United States Patent Application Publication US 2026/0258423 A1 - sequence listing, part 40

SEQ ID NO: 301568 - DNA, 83257441 bp, Homo sapiens (residues 2,134,808-4,269,614 of 83,257,441)
  source 1..83257441: mol_type = genomic DNA
ttcaaatcctagtatctccctctcaatatcctccctgtcatcatcccagaccttttttaaaaagttttattttaatttatttttttttttgagacagagtctcactctgtcacccaggctggagttccgtggcacgaactcggctcattgcaacttctgcctcctgggttcaagtgattctcctacctcaggctcccgactagctgggattacaggcgtgagccaccatgcctggctaatttttgtatttttagtagaaatggagttttgccatgttggcgaggctggtctcaaattcctgacctcaggtgatccacctgcctcggcctcccaaagtgctgggattacaggcatgagccactgcacccagcctaatagttttattttaaattgacaaatagtaattgtatatatttatgaagcacaatgtgatgttttgataaatgtatacatgtggaacaatcaaattggactatgtaacacattcgtcatctcatatacttatttatttgtggtgagaacattaaaaatctattctttaagctattttgaaatatacattattcactctagtcaccatgctgtacaacagatcacaagaacctactcctcttgtctaataaaaactctgtatcctttgcccaacgtctcctctttccccgtccacccccaccaaccccaatcttaaaaactgagttatacttagtgactttatcacaaagcaaagctgtctaagagaaccttatggcaataatggaaatgttctatattatgcttgacaatacagtacccattagtctcatgtggttactgaccactagaaatgtgactagtgtgactgaagaattgatttttcaattttacttaattttaattaactaagttttgactgattgattgaaacagtgttctcactctgtcacccaggctggagtgcagtggtgcaatcacagctcactatagccttaacctctcaggctcaagcaatcttcccaccttagccccttgagtagctgggactacaggcgctaccaccatgcccagctaacttaaattttgtgtagagatggaatctcactatgttgtccaggctggtcttgaacgcttggactcaatcctcccacactggcctctcaaagtgctgggattacaggcatgagataccacacctagcctatatatatatttatgtgtgtgtgtgtgtgtgtgtgtgtgtgtgtgtgtgtgtgtctgtgtgtgtatatatacagatataaatatatacatattttttgagacagagtctcgctctgtcgcccaggctggagtgcagtggtgtgatcttggctcactgaaacctctgccctggggttcaagcgattttcacgtctcagtttcctgagtagctgggattacaggcatgcacaccatgcctggctaatttttgtatttttagcatagacggggtttcaccatgttggctaggctggtctcgaactcctgacctcagcctcccaaagtgctgggattacaggcatgagtcactgcgcctggccaattaatttaagtagacaaatgtggctagtgactgttatcagtcaaccacacagtgagctctaagaaatagaagtaaatcatggcatttcttcatttctatctcatctatctcattgattctaaatatctgtggcaaaatgtttccttttcgcctgctcctgacactccttggaaagtctccatttccctattcagaatttggatttaatgatctttccagaggaatagacacatatgttcaacacacacacgcatacgcacacagagtcctaagtcaaactcagggaaaactttactgaatacaccaaaatagctggattcatggaattcaccaaaaaatgcaccaaagacgattcaatccctgaaaaggcctcacctttttttcctttttttttttttagcttttttgtctaaagacaccagaatttcaattatccttcttggtaagtccttacataagtttagtatgttctttttattaaataaaacacaagaaaaaacaggcatgttctgctcctgaaagatcaaattaaggtcaggcatgatggctcacgcttgtaatttcagcactttgggaggccgaggcaggagaattgcttgagccaggagttcaagaacaggctgggcaacatggtgagacctcttctttacaaaaaaataaaataaaaaaattagctgggcatggtggcacacgcctgtagtcccagctaccttggaggctgaggtaggaggatcgctacttgaacccaggaggtggaggttgcagtgagcgcagatcccgccgctgcactccagcctgggtgacagagtgagaccctgactcaaaaaaaggatccagctaaaagaaatggtttgaatgcaggttactaaccacggaacgcttcttggtacaggttactactaccacactaataggtagacaggagaaaagcaactctccagaagggagtaccaaaagtggtgatatacggagaaatgtttttccagctcaaaagaaacacactagaacaaacaccctaaccttgatgacccccacaggctgctattcaggtgctcatgttttcgatgtgagccaaagtgtcattccttaaaaaactccttgatgtgactccaagaaatggtgtgacagtactcgctgcagattcgcttacaggcacgccagcaggacctttcacatgcaaatgggcttactcatcacagctgtcagggttctcggggaggagtttaaaagaaaaggcaacacttccctctcagtgaactgaggagtgtggctgaccctgattaagtgagaatgaagggataaaagacacctggagaatgaccccagcaagcagaaagcgccatgggactaggtcttgagagaacttgatgggaattgaaagtctttggctctatagattctctgattcagtcagcccaccttgattggttttggcacatcccccacccgcaagctggcttagatattcatggaccttagtacagaatccaaatgtcctctgtatctccaagtcagatcttccttgtctttacagcaggagtgcctgtcaaccatgtcattcagctaggcctcactggctcttcctcacacagccctcataagacatgagcaccacactagacacttggggatggcggttggagagtagtatcacggagctcacaatcgaattgtccagtgtgtagtcttaaaggcagatgcagacagaaagagctgagcgatggcccagaactgtgtccacacctggaaaatgcctttggtgttgttatatcacaacatggaaatacagttatttagtaggaggcaggaaaaaaaaaacaccctggaatttcagaaagaagaaaaaaaatatacggtaaaggtaggcagtggctgggattagtgaaaatgacagtgaaagctttagattttttcaaatgtaaaggttagggaaatgagaactggatactcaaacactccaagataaagaagcctgtcccccatctacaggaagtttatccctgacatctaaatagtcatgttttaaaatcaacaagtttgctggttctcagctgccactaaccagaacccccagtggctgtggcctacagtgtagacagactgtgcccagccagactaaatgaagacatataaccggaagtcagccaccagcctgacccctcccagtttcaggaggagactgagcaaaacactatccagctacaggagtagtagaccagatgctttaaccctagcagcatggggtacaaaggaccccacatatgaatcagcagattcagagagtaagtggtctatgacccaaggaaactctaagaataagaatggaaacttaccagcaaggtcagcaggacttttggtttcccccacctctctccctccctgtccactgcagttacatattcatgtccacagtcacatatttttaaaatttgatataattatctcctagaaattactgtatgtagcctcttgggatctaaagcaattaagtgaagataaatgtatttcatagagcaagctgtcaaaggataaagcaatttcattccccatttgaagtggaggcttgggtcatgcatggtttatttgaaacaaagccatcacctaaagctgctgatcttatctctaactctgttctccattccaaactgctggagatgtgtagcgtggcactgcctgaagttatgacatctggctcaaggccagcagaacaagccagctcctcttctaggtttcaagcataagaggacgaaagtcatattaaaagacagtaactatacaggtgaagtctgttaaaccctaaaaaagggagatgtttccagggtattgggagtgactacagaggcatctaacaatggggaagttgtgcaagaaaaggcagaagaaacagcccccaaatggggtaggtaaaataaatgccaaggaaccagatttttctcttctgggagacaccaaaccaaacagtgaggcctatttcaccaaacagcctaagagatggaaagcacgccagactgacaatcaagagctcagggttctagtactataagaccgtgtgaaacttatggaaaagtgcctgcttttttcttttttttttttttgagatggagtctcactctgtcacccaggctggagtgcagtggcgcgatctcagctcactgcacccttggcctcccggcatcaagcgattctccagcctcaacttcccaaggagctgggatcacaggcgtgcgccaccatgcctggctaattttgtatttttagtagagacggggtttcgccatgttggccaggctggtcttgaactcctgaccgcaagtgatctgtctgccttggttcccaaagtgctgggactacaggtgtgagccactgtgccaagacatttaacaaacaaattttttttttgagatggagtttcgctctgtcacccaggctggagtgcagtggtgtgatcttggctcactgtcacctctacctcctgagtttgagcgattctcctgcctcagcctcccaagtagctgggattacaggcgcatgccaccatacccggctaatttttgtatttttagtagagatgggatttcaccatgttgcccaggctgctctcgaattcctgagctcatgtgatcctcccacctcagcctcccaaagtgctgggattacaggcgtgagccaccacgcccagctgggaaactgcctgttaactaattttttttaaactgttaaggggcactttatttttgagacagggtctcactctgtcacccatgctggagtgcagtagtgagacctcggctcactgcaacctccgcctcccaggctccagtgatcctcccacctcaaactcccaagtagctgggaccacaggcatgtgcaaccatgcccaactagtttttgtacttttagtagagatggggttttgccatgctgcctaagctggtctcctgatatcaagtgatctgcatgcctcagcctcccaaagtgctggggttacaggcgtaagccactgcacctggcctgacactttatttttttaaattcttcatatccaggccgggtacgatggctcacacctgtaatcccaatactttgggaggccaaggtgggtggatcctgaggtcaggagatcaagaccatcctggctagcatggtgaaatcctgtctctactaaaaatgcaaaaaaatcagccgggtgtggtagcacgcacctgttgtcccagctacttgggaggctgaggcaggagaatcgcttgaacctgggaggcggaggttgcagtgagccgagattgcaccactgcactccagcctgggtgacagagtgagattccatctcaaaaaaaaaaaaaaaaattcttcatatccacattgtattcatttttataacatgcagtcaatgcaatatttagaaagtagtattcaattaaaaaaaaaagccattgaagctgtctttaggtgaaatccatgcatgtcagaccttgtctgagcactgctttttacagaagccttgacaaactggaattgcctttcaagtattagtgcattggaatcacctggagagcttgttaaatgagcctgctgggctccaccctcaactgtttatgattcaaaaggctgaggtagggcctaaaacattacaagttcccaggtgaatctgatgctgctggtaatggcacagagaaatctggccaggagaatgatctagaattgcagtgtttaatacagtagccactagccacatgtggatatttcaatttaactacattaagatttgtttttcggttgcactagccacatttcaagtattcaaaagtcacatgtggccagtggctaccatagaggatggtgtggaaatagtaactttccatcattacagtactaaacactgcatcattacataaagtcctataatatttcgcagcactggccaagaatctatttgattgcactggtttgtttagcttagagaaaagaaaacgtaaagagaatttcaagtataactaaggtgtgtcagatatagaaaaaacagactttgtgattttgagaaaacttttaaaaaatcattaagtgggaattacaggaaggcaggctgtgttcagtttgagaaggaacttttttttcttagagatgcggtcttgctctgtcacccaggctggagtgcagtggcacaatcacagctcactgtaaccttgaaatcctgggctcaagtgatcctcctgcctcagccacttgaatggctaggaccacaggtgtgcacaccatacccgctaatttttaaaaaatttttttgcagaggcagggtcttgctatgttgcatggctggtcttgaactcctgggctcaagtgctcctcctaccttggcctcccaaagtgctgagatgacaggcacaagccacctcactcagcctgaggaggaactttttatagtgactgtctcataatagagtaaattctggggaagcatctggagcagaggccattgagaaaactggaggactattttttcattagataagagactggccctgatgtcttctaaggaagcttttaactccatggttcctttgtaatcaatctgatccaattttatagttacaatcactgtttaccatttctttggaatctaggatacttttctgaagtgtgtacttcaggtagaagaaacttcgtttagtgaggatatttggtgataaactctgttttgtttttgtttttggcgggaggacaggatctcactatggctggactccaatgcctgggctccagtgatcctcctgtcttagcctcccaagtggctgggaatacaggcgcacaccagcttctcccagtccttattgtttaaaaatgtctttataacaccaaagcacaagtaacaaaataaaataaaccagattaattggacttcgtaaaaattaaaacattcaagaaagtgcaaggacaatcaaatcatagggagaaaatatttgtaaatcatttatctgataaaggacttgtatccagaatctataaagaactcctgcaactcaaggctgggtgtggtgactcatgcctgtaatcccagcactttgggaggccaaggcaggaggatcgctggagcccaggagttcaaaaccagcctgggcaacacagtgagaccctctctgtctgtctgtctatctatctatgaactcctacaactcaatgtaatctttctatctatctatctatctatgaactcctacaactcaacaataaaagacaacccaattttaaaagtaggcaaatatggccgggcacagtggctcacgcctgtaatcccagcactttgggaggctgaggtgggcggatcacctgaggccaggagttcgagaccagcctgaccaacatggagaaaccccgtctctactaaaaataaaaaaaaaaattagccaggcgtggtggcgcatgcctgtaaccccagctactcgggaggctgaggcgggagaattggttgaacctgggaggcggaggttgcggtgagccaagattgcgccattgcactccagcctgggcaacaagagcaaaacactgtctcaaaaaaaaaaaaaaaaaaaaaaaagtaggcaaatatttgaacagtattccaaagaaataccaacagccactgaacacatgaaaagctgttcaacatcattagttattgagaaatgcaagtgaaaatcacaactgagataccacttcacacacactaggatggctataataaaaaaaataataagtgttagtgaagatgtggggaaattgaaccctcatacatttgctgctagtgagaatgtaaaatgttgcagctgctttggaaaactgtctagtgtggaagttcctccaagagttaaacacagtttaccatatgaccaaacaatactacttctaggtatatatatctaagagaaatgaaaacatatgtccacataaaaactcatacacaaatgttcatatcaacattattcataatagccaaaaaatgcaaacaacctaaatgtttatgaaactgatgaatggataaacaaatgtggaattaccatataatggaatatgattcaggcataaaaaggaatgaagtactgatatgagctgtgacatggatgaaccttaaaacattaagcaaaccagaagacaccagatacaaaaggccataattatatgatcccattcatatgaaagaagcagaagaggcaaatctagagagactgaaagtaaactagtggttgacaggggctaggaagaagggaaaatggagatgacgcgataggtagagggtttctttatgaggtaatgaaaatgttctgaaattagtggtgattgttgtattgctctatgaatataatgaaacaacggaattgtgtactttaaaaggttgaacttcatggaatgtgaatcatatctcaataaattgattaaaatttaaaaagggtattaaaacatcttcactcttattttgtagttaggaaataataaattgtatctttttaagctaaaggggttaaaagtattcttttagatttttttctccacaactgtactggggtataactgaagtgtactaaaactgcacatatttaaagtgtacaatttgatcagttttggctgcaagtggcaggatcatggctcactgaaggctgaaactcctggacttaagggatcctccccacttagcctcccaagtactgggactataagtgcatgccaccacggccgcttttttttttttttttttttttttttgagatgcagtttcactcttgttgcccaggctggagtgcaatggtgcgatctcggctcactgcaatgtccgcctcccgggttcaagtgattctcctgcctcaggctccagagtagctgggattacaggtgcctgccatcacgcccagctaatttttatattttcagtagagacggggtttcgccttgttgacctcgagaccaggctggtctcaaactcctgacttcaggtgatctgcccgcctcggcctcccaacatgctgcggttacaggcgtgagccatggcgcctggccattaatttttaaatctttttgtagagatgggtttctcatcatgtttcccgggcgggtctggaactccagagctcaagtgatcctcctgccttgacttccctaagtagtgggtttacaggcatgacccaccatgcctggtcacctttgtttatcctttacaaggtagcttttttgggaatgataattatttactttaagtatattaaaggctgtgggctgatttccatggaactgtatccacgggaattctttgtggcctgagtagaagctgcttttttccagagaggacttgtctttgcttctgcgggttaccctgggacactgtcagacacagagatcactttaaattaaaccatctgctgctcaaggtttttcagagtacataggtagtatgaattcagactcaaaactcaggtgagggttagctcatggtcgtaaaatgctcaccatgaggtttcctaaagctggaatcccagctttaggcagggcctcctacatcattcctcacctagggcgcaccccacgctttcaggcccgctcaccatagtccaagcagtttttagtgagtaagcccaaagcttccagggcttgacagaaatcatcagggcaagcaccagccagctttggcactcgcttacttttcagaaatcttttgttcatttagttcttaagatctgcagatttctcgttttcatgccagctcaggatgcgttatattatagttagcattttatgttatttatttatatttttatttttttggagacagtctctctctgtcgctctgttgcccaggctgatcagtggggtgaaatcggttcactgcaacatctacctcctgggttcaagcgattctcatgcttcagccttctgagtagctgggactacaggcgtgtgccaccacacccagctaattttttttttttttttgtcctcttagtaaagacagggtttcccccaggctggtcttcaactcctgagctcaggcaatccacctgcctcagcctcccaaagtgctgggattacaggcgtgagccactgtgcccagcctacagggagcactttagctgtgttaattgagaaggttgttcagtgtatctaatcctaccatacaactaaaaatggaagaccctattaagctccttgagttctaaaaacctcatgtagggtgggcgcagtggctcacacctgtaatcccaaaactttgggaggccgaaatggccgagatcgcgccactgcactccagccttggtgacagagcaaggctccatctccccaaaaaaaaaaaaaaaaaaaaaaagcatatagcttacctttgcatcagaagccacagagaggatgctgatgtacctccagaaataaaaacaaaaaagaaaaaacaaaaaacaagaagccacagagaggaaaatccattcttattcatccattctgaactcaattaggtgactgttggtaactggaatagtttctggaaagcacaatccaccctgaagtttgggtcaatgtagattctacctgtctgcaactgttcctgagtagatgaatgatgctctatctaaatctcaatatatattccatgtctttcagttattcagattagcatctgaataactaaaaatatttaaaataagtaaaatcttaagggactcctttcctaaatatttctctttgttgaaacaaagaaacaacaggagaaaaagggcctagaagatatgattaaatgaactaaaataatatatgtgggaggttataattctcaaaaaacaatagtaatgcaaaaatatgcttaagtaaaacctagtgaagcatgtggaagcatgaactctggtgtctggcacatgctaagtggtaaatatttgttagattacataacatgcttactttagatgggcaggtgatggggccaatgcatccacatccctaaacaatgctgagcagactttgtgaccattttcagggaaaaaccaagtcagagacttgacccttgccctagttcagaggaggcaaccccatactgggagatgaacagatatgagtaagtaggtcacctgtgctctgttccccttacctaccaaagaaacatacagcctttggtctaagacaaaaagactaaatttgttttgccttcaggtttagcaaagaatttcagtaacagtgaatttgatggctcaagatgataatgtcttttctttttttgagactaagactctgccactcaggctacagtgcggtggcgtgatctcagctcactgcaacctccacctcccatgttcaagtgattctcgaactcttaagctcaagtgatctgcccacttcagcctcccaggtagctaggactacaggcgcatgctgccacgcccggctaagttttgtatttttagtagaaattgggtttcaccatgttgaccaggctagtcttcaattcctggcctgaagtgagccactcacctcagcctcccaaaaagctgggattacacgtgtgagccaccacgcatggcctaaattgtatttttataaaatctttacaaagtgctttcatagagctgatctcctttaattctcacaacagctctttgagctgggtagggcagttaggggtttccttattttattgaagaagatacagaagcccagagaggttacagggatatttcacttttgcttcaaaaagaaagaaaatccaaaagaaggtatatatgagatagagtttttgttcgtttggtttagaaagctataggttataggggccagaatggtggctcacacctgtaatcccagaactttgggaggccgaggtgggtggatcatttgaggtcaggagtttgagaccagcctggccaacatggtgaaaccctgtctctactaaaaatacaaaaattagctgagcgtggtggtgggtgactgtaatcccagctacttgggaggctgaggcaggagaatcacttgaacctgggaggcagaggttgcagtgagccaggattgcaccactgcactccagcctgggtgacagagcaagactacatctcaaaaaaacagctataggttataggccacacaagtagcttatagcaagttaggatcagagcctaggtgggcgtagtggtgcacacgagtagtctcagctactgggaaggctgaggcaggagaatcacttgagctcaggagttcaagtcccgcctgggcaacataatgagaccttacttcttaaaaaaaaatgatcagagccaacatctgacaccttaatgctcaagcattccaaggccaatcaactgagaaaggagaaattatacatttaaaatgaacacaacaaataagcacacaaaaagatgttcgacatcacttgtcattaggaaaatgcaaaatcaaaaccacagtgcaatactgcttcacaccaatacaccgactaggatggctgttactaaaaaacaaaagtattgtgagaatgtgaagaaactggaactcctgtgcactattggtgaggatgtaaaatagtacagccgctgtggaaaatgtatgacgattcttcaaaaaattaaacacagatgaccgggcacggtgcctcacgccttaaatcccagtgctttgggccgaggtgggtggatcgcttgagctcaggagttcgacaccagcctgggcaacatggtgaaaccccatctctaccaaaaacacaaaaacttagctgggtgtggtggtgcgcacctgtggtcccagctactggggaggctgaggtgggacgatcgtttgagcccaggaggtgcaggttgcagtgagctgagagtgtgccactgcactccagcctgggcgacagagtgagaccccatctcaaaaaataaaataaaataaaataaaataattaaacatagagcaaccataggattcagcaattctactttctacttctgggtatacacccaaaagaattgaaagcaggatctcaaagagatatttgtacatttacgttcacaacagccaaaaagtggaagcaacccaagtgtccatcaacaggtgaatggacacacaaattgtggtagatgtatgcatacaacagaatattattcagcattaaaaagaaatgaacttttgccacgtgctacggcacggataaaacgtgaaatcattatgctgagtgaaataagccaatcacaaaaggacaaatattttatgattccacttatatgaggttcacagagtagtcaaatttatagagaaaagctgggcaccatggctcatacttgtaatcccaacactttgagaggccaaggcgggcggatcacttgaggccaggagctcaagaccaacctggacaacatgccaagactccgtctctactaaaaatacaaaaattagccaggtgtggtggcaggcacctgtaatcccaactacttagaaggctgaggcaggagaattgcctgaacccagaaaactgaggttgcagtgagctgagatggcaccactgctctccaacctgggaggcagagtaagactctgtctcaaaaaaaaaaaaaattcagagagaaagtaaatagaatgatggttgtcaggggctgtggggagggaggaatggagacttattatttcatgggtacagtgtttgagttggtgaagatgaaaaagctctagagatggttgtggtgatggctacacaacagtttgaatgtacttaatgctgtagaaccgtacatttaaaaaactggttaaaatggctgggcaaagtgggtcacgcctataatcccagcactttgggaggccggggagagtggatcacttgaggtcaggagttcgagaccagcctggccaacatggcgaaaccctgtctctacaaaaaatacaaaaattagccgggcgtggtggcacatgcctgtaatcccagctactcgggaggctgaagcaggagaatcacttgaacccaggaggcagaggctgcagtgagccgagatcacaccactacactctaccctgggtgacagagcgagattccccctcaaaaaaaaaaaaaaaaaaaaaaaaagggttaaaatggtaaattttatcttatgtatatttcatcacaattaaaaaaatagaatgaacattacttaaagaataagactaatctctcttcctaactcctcaccctcttgcctcttctggtagttgacattttgcagcttctggtattgacaacacaaggaagaacaggtgaaagctaccagtgaacgaagggctgtcccgtgacccccatacacctggagcaaaaagcaatctaggcagggcttgtaggcactccttgacatcgtggtctgactggcaaggccaaatattgtcctcagctctgtctgtgtgagatatggaggtgaagaaagaaataacaaaggactgcttcagttgtctttttatgggttgggccctccaagaaacagagctggctcttagtcctaagaggctaaaacttgccttctatcaaaatgtaagtcagtggcaaagcaccaattccaacatttcagttctaagtccacaggactttaatgtttccaccgggagggtcctgctcatgttttgtaatcctaaaaggcagaactgcctgttcattcatgttcagtttagcaggagggctagaaaggagacaggttagattctggcagagtgccttcttcccccaactgcatccagtctagagcaggggtcccagcccccggggttgtggaccgtggtaccagtccatggcttgttaggaactgggccgcacagcaggaagagagcggtcaaagcaagcaagaccgcctgagctccgcctcctgtcaagtcagcagcagcattagattctcacaggagtggagcgcgaaccctattgtgaaccacacgtgcaaggaatctagcctgcgtgctccttctgagaacctaactaatgctggatgatggcaagtggaacagtttcatcctgaaaccacccactgctaaccctgtctgtggaaaaactgtctcccacaaaaccagttcctggtgccaaaaaggttggggaccaccggtctagagtatcaagggcccaataccaatgtgttgaacagatgctgttggcactgtctactgtgttcatcaacatccccaaaggacacagctatgccccatgtcatcaggggtagctcgcctctaggtggttatgtcttcctggccctcgatgctatggaagtgatccccaaaggacacagctatgccccatgtcatcaggggtagctcacctctaggtggttatgtctcctggccctcgatgctatggaagtgaccaggttcaactctgatggccatcttgagatgttcttcctattacactttatattgctgttcccagaagtcaggcaaaggcaaatcacaaaagatctctgcctatacaaagtatgactctaaggtaataagatatgtttttaaaaatcacaaatgagtattggtctaattaggatacttgacagtgacatcttacaccgaggctgtgaaataccctttcccccaactctcaaacccagatctcacttgagtgtgaaggattaaaaaaaaaaaaaatccgtaacccagctgtgacacttccttccacctctacctgtacatctgtttcctatggcgtgctgccgcctcaagtaagatgggtgaggcttctgtagatgctggggaacaagatggaacaaaaatgcttcacacctggctcccaaattacaggaacgctggaccgaggccaacataagctggcacagcaccagctgaaatggacatcaattaaggagcttgtcatctttcaagactacagggtcttttttcactccacagtctgcactgctccacaaaccagccatagcaccactagcagggttttccagatgggatcatttcccttagattccacatttgcagatttattgcagaactttttaacccatccctccatttttaaagcctgaaatattattccacattacagttttatattcaattgatttgtctatagcaaaatctgtactttcatgagcagaaaaagaaagttttaagcctgcctacaagttgctgtttgcttacaaaaagacatgcaaataactgagattcacgaaggctcagaaattcttctctgaacacattgctccaactgggatcagaagtcagagagccttcaccaggctccactgtcctggagaaatggtcagatctccagcactaaggcaggcctcctctgaccatcacatgcagtgttagtgatccatgtcacatgcacaaagaaaaagaaactctactaatgtctagtcagtggcaaatgctgcttaagaaaaacatcttaacacggatcagcaattaaaaagtgacaagattccacatagtatcttctcttgacttttatccaatggggcaggacattttccctacacctatgcggctgcccagtggaaagaattccacacaacatgaaagagacccatggtgagtatgttctgagaactgaattccattgcctcgggggcctgtctgctgctgccaatttgcttctcatggcagaaccctgtgtgtcagaaccctgactaggctctgccgatggttgtttggaaaagagtccagctggagatgaaaggagttcttcaaagcaatgactccttggaggctatcactttagaattgggaatgattacttatcaaaaaacgacttcactctggaatatactacgggcaagaagctggcctgacctctcgggtattctgttggagtcggcctgagccggagaggccttgatgaatttggagtgatggcaggaagtgaggaacccagttgaaggtaagagcccagaagctacatcataggcggggacaggagaaagaactgaaaaaagcttcagaaatctgtctggacaattcagtttggcccaccccttatccccctctttcattttaaataaacagcttcaaaaggggtggtcctcacaactttctgctgactaaggtctcaatttccttatggtcctctactaagagagcctgtgaacccttcagctctcagcatttaatcagtcaaaacttagtctctaaagtgaaaagacaagccacagactgagagaaaatatctgcaatgcatttgtacctgacaaaggatttgcatcctaaatatataaagacctctcaagactcagtaagaaaataatccgatttaacaataggcaaaagatgtgaatagacacttcaccaaagaagatacacagatgacaaatgaacatatgaaaagatgctcaacatcattagccattagagaaatgcgaattaaaatcacaaggtacctagtataattattaaaaaacaaacaaactgacaggatcaagtgctgataatgatgccagaacaggaactgctcgtgcaatacggtgcagccactttgtaaaacagtttgctggtctctagcgaagttaaacatactcttatcacataaaccacccgttccactcctaagtatttatccaagagaaatgaaaacctaagttcatttaagaaacgtaaagactgatgcacaaatgtttacagcagttctatccatgaccaccaaaaactgcaaatagcccaaatgttcaactggtgaatggataaacaaatcatagtgtatgtatacaatggaatactactctgcaacaaaaaagaacatatgattgatataggcaacagcatgcatgaatctcaaatgtattacgctatgcgaaaagaagccagactcaagagctctatatcaagcttatccaacccgtggcccacgcagcccaacgcaaatttataaactttcttaaaatactatgagatgttttttgagacttttttttaaagcttattagctatcgttagtgttagtgtagtctatgtgtggcccaagacaattcttccaatgtggcccagggaagccaaaagattggcacccctgctctatgtactgtatgattttatttatacgtcattctggaaaaagctaagttacagagacagaaaacatcagaagttgtcagggactggggttgggaagggagctggttgcatgagggaatttttgggggtgttgaaaatggtctatatcttaattgtagtgatggttacatgaaagtatgtgtttctcaaaactgtacaacagagtgaattttaacttatgcaaacccgcccatcttggttgctaagagtctctatggcacaggggtaaactggtggaacgccactccacgcggtgactgggggaacctggggatgcatgtagagtgtgacggtgactggggaacctggggatgcatgtagagtgtgacggtgactgggggaacctggggatgcatgtagagtgtgacggtgactggggaacctggggatgcatgtagagtgtgacggtgacgggggaacctggggatgcatctagagtgtgacggtgactgggaaacctggggatgcacgtagagtgtgatggtgactgggggaacctggggatgcatgtagagtgtgacggtgactgggaaacctggggatgcacgtagagtgtgcggtgacgggggaacctggggaggcacgtagagtgtgacggtgacgggggaacctggggatgcacgtagagtgtgacggtgactggggaacctggggatgcatgtagagtgtgacggtgactggggaaacctggggatgcatgtagagtgtgacggtgactggggaacctggggatgcatatagagtgtgacggtgactgggggaacctggggatgcatgtagagtgtgacggtgactggggaacctggggatgcatgtagagtgtgacggtgactgggaaacctgaggatgcacgtagagtgtgacggtgacgggggaacctggggatgcacgcagagtgtgacggtgactgggaaacctggggatgcatctagagtgtgacggtgactgggaaacctggggatgcatctagagtgtgacggtgactgggaaacctggggatgcatgtagagtgtgacggtgacgggggggaatctggggatgcatctagagtgtgacggggctgagggagggcccactttcaccttgaaattacagacaacactataaaacagacaaagatttatgttggaaaaaaagaattttatgccctttgtccttcaactttttccttgttgtagagacaatacaaccttctttagagattacaaaggtatgaaatctcagcctggtattcctcctccctttacatgtcctgtttcacttaggcagaggtctctgtttctccaaaagagcaaagtgtatattcaagctgaaatcagaggcctagactaactagaggcctgctggctggaagggattaatgtgcacagaacttaataaaaatgaatactgaaactattgttaataataaacacctgctaacctctaattaaaaagtataaggacagcatggtggctgtaatcacagcactttgggaggccaaggtgggtgaactgcttgagctcaggacttcaagaccagcctgggcaacatggtgaaatctcatctctacaaaaaaatacaaaaattagcggggtgtggtagcatgtacctgtggtcccagctactcagaagctgaggtgggaggatcccttgagctcagaaggttgaggccacagtgagccactgcattccagcactggcaacaaaacaagatgttgtctcaaaaaaaacaaagtatactctgagaaaaaaaatttttttttttttttgagatggagtctcactccatcacccaggctggagtgcagtggtgggatctcagctcactgcaacctccaccttgctggttcaagtgattctcctgccttagcacccctagcagctgggattactgggattacaggtgtgcgccaccatgcccggctactttttgtatttttagtagagacagggtttcaccatgttggtcaggctggtctcaagctcctgacctcaggtgatctgcccgcctcagctttccaaagtgctgggattataggcgtgagccacggcgaatgaaccaagaaatctgtcatgttttcagtgggtaagggaaaaaacataaagtatccatgtgaaaataaagtttctcttcatgtcattaacaataaaatgatgaggatagccacctccaaagatatagcagattaaatgaaaaagtatgcctcttataatgaggttacatgaccataaggagcaagtaggttccatggaaaaagatgtgtgttacagcagtacccagaaagctatgaaagcagtgagcctgaagaagagaacacatcccactcctaccatagtgtctgatctccacgcctctgcttcacaacttagtccttctagcactttttgggtgcttcaagagaggaaggaaatggtacagaaacgcagcttgtacataaagggcacaagcatgtaagcatatgcacacatacaaatgcagagaaaaggtcttttcatttaaatggaggaagctgccatgtctacctctataagcaaaagtattaatcatccaccgtctggttttaatccacacgctcctgatcctgcatttgaatgtattgttatcaggggaagaagcatttctgctcaatcttattcaccagccaaaaacctgaaaatgtgaaaaccacattggtagggtaccttcttggggacccagaaaactgagctgagctgctcttttactgttttctttacctttttttttttttttttaaaataatgaacaaatgtcaatttcaggggcactcagattagatagagctcaggccgggtgccgtggttcacgcctgtaatcccagcacttcgggaagctgaggtgggcagatcatttgaggtcaggagttcgagaccatcctgggcaacataatgaaactctgtctctactaaaaatacaaaaaaaattagccgggcgtggtcagtgggtgcctgtaaccccagctactccggaggctgaggcaggagaatcgcttgaactcgggaggtggaggatgaagtgagctgagattgcaccactgtacttcaccctgggcaacagagagacactccttctcaaaaaaaaaaaaaaaaaaaaaaaaaaaaagagttaaaagctcaaactacaggtccttctatcttagagtgacactatcctcagggaaattagcatcttttcttctgttatttcccaaagagatccagccacacacaacttgactaacatcagcctgtcagatgcaagactgggcacccaggtgcatcccttatgagcatttacaaatgaaatgccaagcccaaacagcaagcctttccctcctgtctctgttttgtttttttttgcttgtttgttttttgagacagggtcttgctgtgtaacccaggctacagtgcagtggcacgatcactgctcactgtagcctcgaccttccaggctcaagcaatcctcccacttcagcctccaagtagctgggactacaagcatgcaacgccatgcctggctaatttttatttttttgtggtgacaaggtctcactatgttgcccagactggtctcgaacttctgggctcgagcgatcctcccgctttagcttcccaaagtgctgggattacaggcatggtgtcaccgggtgtgtctccattcttctagttcatgctttgctaacagtaagggaagggtttaaaaaagtgtttgtatgtatctcagcatgtttcttccactgtttgtgctagagaccctccctcctcctaagggttaacctaaaaaggttcccaaagtccgtatgtgggctgaagtaccttcttcaaagccattagtcaccaaccttgcagtcttactccagactgcacacggggccacccatgacacaaaaactctggcaagattaggggctagcaagagcagaagaaaccacaatatgcctgagactcccaggagaacagtgactagtgctggtagggaacagactgacagacaaagcagacagactctaaccaggcctcgctctgttttcgatgcaacacaaatgttttccattaaaagttccctgccccacaaacactcatacatgcagctatgaactccacatactcaacttctgcttttctggcacactgacccaactacctctcctgttcctctggaagagagcaaagatgagggtaaacagattttggtacccctatcacaaaggtaagtggaagggaaccacaattagaagcatgcttactaagtaccacccaacatgagtatgactgagcaggccaaagggaagaaggcagaaagcatggactttccttttgccaaaaccaatcctgtctagctttggatcttactgtttggctctcatgctttcagcttaaagttaggcttaactttgtagtaaagtctgcaaatgatcttcatcaggaggtgttggtcaccaataaaaccaaaacaggcaaaaacctcagaacactcattacaaagtctgcaaaattctagtactaagcaatcagggaatgctggctgatttgtaacctgtatttcaaatgcttagaaccagctgggtattgcaatggcgacaagaagctgaattagaaatccctaaaccatcagcaagctctcctcccaccaccagtagaacctggcccaggtgcatttctaaccaaagtcacaggagtgggacacataaatgtttgagtaattccttaaaagaaaagaaaccacaagtaagaatttaagggagtaataaaaaggggtgaacattgaaaagaagggaagaagttaattttttaaatggcatgtgagaaataaaaaggaaatcccctgttcaggcagctctggagttccctaattgcacaagagcaaaggacacccccacggaacatgtatgccttctgaagccattgctcaacctacactcattgtgcaatttcaatcttccaaagttttttgctgcacatatgcaaaccacgttttcctctgcattctagaattaagaacagtttatcattattctcttcactttagagaggggtgtatgcatgagccaaaaaagaaaaaaaaaagtattgctagataagcattcactacaaatgaggttttatattatttcatctggttatttctgagtttactggtagttaagaaacacttgaattcactcttaggcagctaaagattcatttttcctgtcactgacaataatgatatcacaaaaaatagcccacgaaaacatcaaaccttcaaaagcctttgtcctaaatgatggcaattctagagtatttgaaacagttaaaagtggaagtccctactgtgtagtcaaaattccaccggaaggctaagcgccgtggctcatgcctataatcccagcactttgggaggctaaggcaggtagatcgctggagatcaggagttgagaccagcctgggcaacatggcgaaaccatggctctacgaaaattacaaaaattagacaggtgtggtggcgtgcacccatagtcccagctactggggaggctaaggtgggaggatcccttgggaaacagagcaagaccctgtttcaaaaaaaaaaaaaaaaagtttgctgttcaagactatgtttaaaaaaaaaaaaaaaaggcaaaccagtcacagaccacgagaaatattcacaggatgtatatctgacaagtatttgtgtcaagaatatttgaagaactcttataactcaataagaaaacaccccaatgtttaaaaatggccaacagattagaacatttcccaaatgaggatataataattgtcagtaaactcataaaaagatgctcatcattattcaggaaaatgactattaaaactatggccaggcacagtggctcacgcctgtaatctcagcactttgggaggccgaggcgggtggatcatttgaggtcagaagttcgagaccagtctggccaacatggtgaaaccctgtctctgctaaaaatatgtaaaaaaattaggtgggtgtgtggtggcatgctacagctgtaatcccagctacttgagaggctgaggtaggagaattgctttaacccaggagacggaggctgcagtgagctgagatcacgccactacactccagtgtgggtgacagcgagactctgtctcaaacaaacaaacaaaaaaaccctccaaaaacataaaaccaaaatgagatactacttcacacttactagcatgtctaaaactataaagatcagaaataccaagtgttggcaagaatatgagcaactagaacgctcacatattgctagtgggagtataaaagggtgtaatcacttcaaaaaagtttggaagcttcttttaaagttagatatatacttaaatgactaagcaattctactcctggatatttatccaagagaaatgaaaatatatgaccacaaaaaaacctgtacattaatgttcacagtatctttttcataacccctccaaaataaaaacagccaaaatatctatcaacaagtgaatggataaactgtgatatatccatacaatggaatactactcatcaataaacgactgaaaaaatataatgcccaatatggatgaatctcagacgttatgctgagtgacaaaacaaagacataagagtatatactatatgattccatgtatatgaaattttataacaggcaaatctaatctatagtgagaataattagatcagtagctgcctggggcagggagtaggatgggggatagaggcacttgggaacattttgtggagaaggaaatattctataccttgattgaagtggtccttatgcagaatatataaatattctgtatcttgatacgggtatatatacacccatacattcaaatgtatacctttcattgtatgtaaatatatattagtaagttgattaatgaagtaaaggtattaactataaatttatttttaattaatttttttgagacagatctcactctattgcccaggctggagtgcagtggtgcaatctcagctcactgcagcctccgcctcctgggttcaagtgattcttgtgcctcagcctcccaagtagctgggattacagggtgcacaaccaaacctggttaatttttgtatttttagtagagacagggtttcaccatactgcccaggctagtctcgaacccctgacctctggtgaaccgcctgcctcggcctcccaaagtgctgggattacaggcatgagccaccgcgcctggccttcaattgttttgaatatctaaaattatgggctgggtacagtggctcatgcctgtaattccagcactttaggatgccaaggcaggaggatcacctaaacctaggagttcaaggccagcccaggcaacatagtgggaccccgtttccacaaaaaatttaaaaattagccaggtgtgatggcgtgcgcctatagtccccagctactcaagggactgaggtgggaggattgcttgagcctgggaagtcaaggctgcagtgagccatgattgtatcactgccctccaccctggacaacagggcaagaccctgtctcaaaaaaataaataaaataaaagtaaatataattatgaagtaaaaatatatattcttttacatatatgatattatattagtaaagaaaactaaaaagggtgagacaaaaagtaccagggcagaagtttaaatcaaagtttctttttctatcatacattctcctcttaaccaattttaattttatatttattaagtcttgagacaaaggttgtatgtatgtatgtaggtaggtaggtaggaaggctaggcaggtaggcatgctcacataactgacccttttttttttttttttttagagatggagttttgctctggttgcccaggctggagtgcaggggcgcgatcttggctcactgcaacctctgcctcctgggttcaagcaattctgcctcagcctcccgagtagctgggattacaggcgtgcatcaccaagcctggctaattttgtacttttagtagagatggggtttcatcatgttggccagactgttctcaaactcccgacctcaggttgatcagcctgcctcggcctctcaaagtgctaggattacaggcatgagccaccaatcccggcctttatttatttatttttttttttgagacagagtctcacacactgtcacccgggctggagtgcaatggtgcgacctcggctcactaatcttcaggttttcatataccagtcatcatcattaattactgttcatctataagcaatcttgcctccaaagtttggagtccaggacattgtcctgatcttctggtcctcagacattgcactgccactactcttatatttttgcccttgaacacacctcctaaatgatgtagataagactacatacatttagtaccactcagagcactctcaagtctcaaggatttgtctaaaaaaaaaaaaaatcaaattctctcttcaaagactcaaattctagactttgaggtgcttttgaatccagggcattccaagatttgaagaacattcaatccagagggaaagatgctgataaattcagtctgagcattctattccactcatatgaacctttccttctttgtttatcctcgggaactattctgagtccctttaaatatctatgaaatgatagagagggaggtctaagaaggagaaactatctcaaagggtaagaacaaaagacttatgtgtaaggctccctgagatggcatcgtttatacaacagataaaagtcaataacttcctataaaacatctaatgattgaggactaaacaaatattataatatattcatacaatattgtgcagctcttaaattcatgttataggtaaacatggaaatatatatttattgctaagtgaacaaagtacattacaaaacaaaacataaagtttgattctatttctgttaaaaagcaaaaattggccaggcgaggtggctcacgcctgtaatcccagcactttgggaggccgaggcggccagatcacgaggtcaggagatcgagaccatcctggctaacatggtgaaaccccgtctctactaaaaatataaaaaaaattagccaggcgtggtggtgggcgcctatagtcccagctactcgggaggctgaggcaggagaatggtgtgaacccaggaggtggagcttgcaataagcccagattgcaccactgcactccagcctgggcgacagagtgagactccccatctcagaaaaaaaaaaaaaaaaaaaaaaaaaatcagtgctggacatggtggtttgtacctgcaatcccagctattcaggaagctgaggcgggaatactgcttgaagccaggagttcaagaccagcctgaggaacacagctgagatcctgtctctaataaataaacaaataaccaaaaaacttcacttatatccagtcatccatctacctatcagccatccttctaggttggaacatatgcagcaacatggaacaagaaacagtagttatctctgggtagtggatcaagaaaatcttttcttttccgtattgctaatcttgattttcctctctttttttgagaaagggtctccctctgtggcccaggctggagtgcagtggtgcaatctaggctgagtacaacctctgcctccttggttcaagtgatcctcccacctcagcctctcaagtagctgggactacagatgcacaccaccacacctgactgattttttaattttttatagagacaaggtctcattatattgcccaggctggtcttgaactcctgggctcaagcgatcctcctgcctcagcctcctgaagtactggcgttacaggtgtgagccaacatgcctggctgctaatcttaatttgtaaagtatttctaaatgaacatttattttgtaatacaaagattattttatttattttttagacagggtcttgctctgtcactcaggctggaatgcagtggtatgatcacagctcactacagcctcgacctcctgggctcaagtgattcacccacctcaacctctcaagtagctaggaccacagacggaggccaccaagcccagctgattttttaaatttttagtagagatgctgtgtttcccaggctggtctcgaactcctgggctcaggtgatcctcccaccttggcctcccaaagtgctgtgattagaggtgcgagccactgtgccaggcaccaaatcttcattttgtttgattctaatatgtagatatgggattgatttttgtacaatggcttcatatccagcaactttgctacatttacttattatgagaataattctaataatttatgctttttggggattttctaaatgtatcatgttattatctacaaataaaaacagctttattttttcccttccaacagtcttattaatacttcatttttttttttttcacgtcttactgtactgactaggaccaacacagactgaatggaactggtaactcaccgcccttatcttattctgtttcttgagctgcttgcttggtggttatgtagttgtttattctctaaggctgagggcagcagatcacttgaggtcaggagttcgcgaccagcctgggcaacagggtgaaacctcatctccactaaaaatacaaaaattagccggtgtggtggcaggtgcttgtagtcccagctactcaagaggctgaggcaggagaatcgcttgaaccaagaagacggaggttgcagtgggtctagatcacgttactgcactccagcctgggcgacagagaaaaactctgtctcagaaaacaaggacgacaatgacagggtgaaaccctattgtactaaaagtacaaaaatataaaaacttagccagagaggggcacagtggctcacacctgtaatcccagcactttgggaggctgaggtggaggcgggcaaatcacttgaggtcaggagtttgagaccagcttggccaacatggtgaaaccccatctctactaaaaatacaaaaattagccgggcatggtggcaggtgcttgtagtcccagctactcaagaggctgaggcaggagaatcgcttaaacccgggagacagaggttgcagtgagccaagatcatgctactgcactccagcctgggcaatagagcaaaacgctgtctcagaaaacaacaatgacaatgcaaacaacaacaaaacttagccgggcgtggtggcatgcacttgtaatcccagctactagggagactgaggcaggatcatcacttgaacccaggaggtggaggttgcagcgtgccgagatcgcgccactgcactccagcctgagtgacagagtaagagagtgagactccccgtctcaaagaaaaaacaaaaacaaacaaataaaaaaacaaccagccgggaacggtggctcatgcctgtaatcccagcactttgggaggctgaggcaggtggatcacctgaggtcaggcgtttgagaccagcctggctaacatggcaaaaccccatctctactaaaaacacaaaaattagccaggcgtggtgacgcgtgcctgtagtcccagctactccggaggctgaggcaggagaattacttgaacctgggaggcagaggttacagtgagccaagactaaaccactgtactccagcgtgggcgacagagcgagactccatctcaaggaaaaaaaaaaaaatccttgatgacatctgcaaaggtctttttgtcacgtaaggtaacatgtaacaggttttagagattgaagacataaacctctttggggtgggggtgttactttgcctaccacaaagggttacgacagctcatgaggtagacacagaccaccacttggaagctttctcactgctacgaatcagtaccattcgcaatgcttcagcagttcagagaggtctaaggcaaattcccatactaaatggaaagtggcccaatgacagaatttcttcttcacatggtagctccaagaaggtgacaggacactgcagtatcatttatatgaaagagactgaaaaaaaaaaaactgaaaactagacatgagcgatagctctgatacagcagctccactgtatacagaacagaaaatgtagaaaataaattcatttattgacattgcacaccacttggtccccttcccactcccttgaggttaatgacttgctaatatagcttattctttatccaaaatgcctgggaccagaagtgtttcagattttggaatatttgcactttatccttactggttgagcatccctaattggaaaatctgaaatcaagctttggattttagagtcttttgtatttcagatttttggactagggatattcaatgtgtacaaactctatacttgagcaagggatttcacctattatctgtgggtcactctgggaggccaaggcgggaggatcacttgagctcaggagtttgagaccatcctgggcaacacagggaggccttgcctctaataaaaaagtaaaaataattagccaggtgaggtgacgcttgcctgtagtcccagctactcaggaggctgaggggggaggatcgctttaacccaggaggtcgagactgcagtgagctatgatcacaccactgcattccattctgggtgacagagtgagacactgtctcaaaaacacaaagaaacaaacaaaatggacgggcgcggtgactcaggcctgcaatcccagcacttagggaggccgaggtgggcggatcacttgatgtcaggagtctgagaccagcctggccgacatagcaaaaccccgtctctactaaaaatacaaaaattaactgggcgtggtggcaggtgcctgaaatcacagctactcgggaggctgaggcaggagaatcacttgaacttgataggtggaggatgcagtgagccggggggtcacgccactgcactccagcttgggagacagagccagactccatctccaaaacaacaacaacaacaaaaaactactgtagacaaagaaggtatccagtgagaatctacctaatctgttcaaagaaatgtaagtgaccagcatcaaatcgtagaaactagagctgaggtctaagaaaataatctgcaatatattaataaaaaggagaatgtagcacgcaaatagagaaacaaattatattttgggggaaaaaatgccaaatgaaaaagaaggtactatctgctatattctttcaattgaatttatttttaaagacaaggtcttgctctgtccctcgggctggagtatggtggcacaatcacagctcactgcagcctagacggccagggctgaagtaattcttccacctcagccacctgattagctggaactacaggtgtaataccatcaaccctggctaatttttatgttttttgtagggacaggtttttgccatgttgcccaagctggtctcaaacccctgggctcaagtgatctgtctgccttgacttcctaaagtgctgggatgacaggcatgggccactgctcctgaccttcaactgaattcttcaaattatagactctgtgaagtatgctaaatgaaaaatgaaaaagcaaagacagatataaggggactgaggccaggcacagtggctcatgcctgtaatcctagcactctgggaggctgaggcgggcagatcaccttgaggtcaggagttcgagaccagcctggccaatatggcaaaaccccgtctctactaaaaatacaaaaaaattagctacttgtggcagcgcgtgcccctgtaatcccagctacgcggggggctgaggcaagagaatcgtttgaacttgggaggcagagggggtgcagtgagccgagatcacaccactgcactccagcctgggcgacagagtaggactccatctcaaaaaaaaaaaaaaaaaaaaaaaaagatataaagggactgactaaaaggcaggcaaaaaaaataaaggttataagatataatgtaagagaacaaataatgcaatagaagacttaaaacctgaactagaagtagtaaagagtagaatcaatgctataaaaatatatcaagatgacaaacttgagaaaccttcctagaatgcagaagaaaagcaaaaacagattaaagtgatgacagaaaaagtgacatataggacaaagaatggagatctaatgtatcaggacagcagaaattactgaagaaaagaatagaacaaagagagtatttgcactcaaaggcatataaggtgaaaacttttctgcttcaaagatacaatgattacgttaatgccaaatcagtgctcttgaagcacgccttcaccggggtattaccagctcaacaaaactcaagaactcttcaaattcacttatggtgccactcacatctttatatatggcacaaactgtctctcgaactaggaagatacctgccttatgtgtctggatctcccaggctgtgttggcaatacgtgtttcgtaagtatctgcagaataagcatcaaggcaggaccaaacatgagactaatctcgaccagcaataaagctgctcacgttgctgccactgatgagcactggagatatgttttacatttcctagtaatgaacactagaagctggaggaaatgtttatatttttcaaatttcctttttctttcttttttttcagacggggtcttgctctgagacccaggctgcagtgcagtggcgcaatcataatgagcaccaaacccctgcacttaaaaagttctcctgcctcaggctcctgagtagctgggactacaggcgcttgccaccacacctggctgtttttaaacttgtttgtagggacaaggcctcactatgtcacccaggctggtttagagatcctggtctcaagtgctcctcccactttggccttccagaatattgggattactggtgtgagccaccatgcctggcccttttgcaggttttttttaaaaaaattttatttatttattttttgagacagagtctcactctgtcacccaggctggagtacagtggcacaatttcagctcactgcaactccacctcccaggctcaagcaattctcatgcctcagcctcccgagtagctgggattacaggtgcctaccaccatgcctggctaatttagtagagacgggatttcactatgttggccaagctggtctcgaactcctagcctcaagtgatccacccgcctcagcctcccagagtgttgggattacaggcgtgagccatcacgctaggtctgcttttgcagatttctaaaaggtcaagagttcctaaagattcaactcctaggttggccatggaaatgacccatgtgagcttatcatcattcttttctcttgagcctcagtatcctcttttacaaaatttgaagggtgtggctcacacctataatcccagcactttaggaggccgaggcaggaggatcacttgagcctagcctgggcaagatggtgagaccccgtctctattaaaaaacaacaaaaaaagttttttttgttttgtgttgttttgttttgtttttgagacggagtcttgctctgtcacccaggctagagtgcagtggcacgatcttggctcactgcaacctctaccttctgggttcaagcaattctcctgtctcagcctcccgagtagctgggattacacggcccgccaccacacctggctactttttctatttttagtagagacggggtttcacaatgttggccaggctggtctcagactcctgacctcgtgatccgcctgcctcggcctcccaaagtgctgggattacaggcatgagccaccatgcccagccaaaactttttttttttttaatcagccaggcatggtggcacatgcctatagtcccagctactcaaaatacaaaaaatttagctggtcatggtggcgtgcctgtaatcccagctactcgggaggctgaggcaacagaatcgcttgaacccgggagaaagaggtcccgcagaggcgggaggattgcttgtgcgcaggaatttgaggtggcagtgagttatgatagtgccacttactccagcctgggtgacaaagtgagactcatctcttaaaaaaaaaaaaaaggaggtaataatacttacatggcaggcttatttagagaacttaacgaaatactgtacagaagtacctagctcagggactgatacatgatagatactcaggagatgttattttcccctgccgtggatggagaataataaagcagagtaccactttatatgattatatgatgtggccagggaagctctctttaccaaggtgatagaagggagtgcgagaggcacacagccgagtacagagtgtttccggttaagaaaagagcaactgcaaagaccctgaggcatgagcgcttggtttgtttgaggaacagcaaggatgtcaatgtgactagagcacactgggttgaaggacagtaggaggacctgaggtcagagagcttgggagtgggatgaaggtggggtcacataatggagggcatcgtaggccactgtgaaaactttggcctctaagtgagaggagcaaccatcagaaggttttgaactaagaaatgacatgatctcactgatattttaaaaatagactgaagagtagaagggggaaggaaccagagcaaccagtcagaaggcatttcagagaactgaaccagggtgcagtgggaagacagaattgtatctgtgtgtgttttgaaggtaaagaagacattacctgctgatggattagatatggaagtgtgacaaagaagtgccaagaataaccccaagcattttgacacaagcagcccaaaaatcaaggctgccatttaccaagatggggaagggtaaaggaagaccaggttggcgggcagcgggtggggcaggattcaggagtttggatttggacatgttaggtttgacatacctatttcacagtcgttgaagtggagacctaccttagtctcactgagccgccactgccccctaggtagcctgtggatcactacataggctgagggctggtctgctggctctgtgttctcctcgagccaaaacacatacgtggtatctgacactagagctgagagagctgatgaagatggggcgtaggaagagtctgaagctcgttaggactcttctactcagcacctgtcccacactaaaagacagcttcaatagcgaactccccaaagcatcctctggaatcaagaccaccttgtgatcaccaaagaaaagtatggggatcctctggcccaagccatgtcatccagtctctcttctaactcaacatcttccacatgtataaaacaacttgttagctgtcctcagcctcacatactacaaatccccattattttcccattctgagactagaagagcagaatttcactctacgtttttgttggaaaggcaaaaagtaagtattcctcttgggaaagaagggttctctgattcccaagatgtagtagccattaagtgcatccaaagagtatgagtttttgatatatcaatgtctagaaccttaatctacttacagcaatttaaccaaagggaatatatgctcaaattctgctacaagaaattgatacactattcataactgtaaaaaaattgggaacattctcttggttcaataaagcaaagattggttaaagaaatcttggaatataaaagaattctgggtaactataaaaatgattccatataagaatatattaaaaatgttaggaaaaaagcagattacaaacagtatatacagctgggcatgttagcgcagacctataatcccagcactttgggagactgaggcaggtaaatcacttgagttcagtagtttgagaccagcctggcaacatggtgaaaccccatctctataaaaaatacaaaaattagctaggtatgaaggtgggtgcctgtagtcctagctatgtgggagggtgaggtaggaggatcacttgagcctgggaggcagaggttgcagtgagctgagattgtgccaccatactccagcctgggcaacagagtgagactctatctaaaaataataataataaaataaaataaaaacaaatagtatatataaatattaatataacctccagttttattgaaaatgaaagagtgtgtgtgtgtgtgtgtgtgtgtgtactataaattaaatacgattatatatgatcagcaaaataacagtgctctcacttctgggtagaaagaaggattacggataatttttcctctttttatttgtgtgtgttttccagattttccacagtgaacaaatactcttttatactaaaaactgtttgtttgcttgtttgcttgtagagacaggtttctcatgttgccagggatggtctcaaactcctgggctcaagcgatccgcccgtctccgcttctcaaagtgctgggattaaaggtgtgagccactgcaacgggccaagactttatattctacataaagtctctcatatttgtggctcatgtttggaatttttactttttttttttttttttaacatctccctatgtccctagtatatacttcatgtaggtcaaaagacttcctcctgagaagacatttgtggagcctccccaaaggcctgtccccaggggatgtgatcctcactactctgcagagaagtcagtcacagggtattcctgcctccacacagcacttcgctcccaagctcggtggctactacttccctagcctagtaactgttattacacgtgggaaatgtgaagccgactggactacccctactctttacctggctgaaaacccaactgataagcagagactaagaactccacagtctccaacagcgcaacagggaatcggctttgttttctataaacagacaggcaagaaaaacgttcaggttaaaacgcagtcctcagaggaaggaaaatagaaaccaggcagtggggaatgcttcatattcctacaagtttttttttctaagttaacacatggtgtctgcttctctctagtcacctatttatcactctcctcctcagagaagggaaaaagccctggctgttttcctagtgcagagctttgtggcggaggggggcggggaggaagggggagaaaggagggtgctttaagcatgatgcaaaccatttggagctgagtgagagcactgccaacacaagctgcactatttaaacaagtgaggaaatgatcgtatatacaacatgccagcaagcacacacacacaccaaaggaagtcgagagggcttttttttttcaggacacagagctggatgtcagcggctaaaaggtcgatattttcccttaacacccttctcaatgacttaatcatgttccatttgcacagaaaacttcccaagaataaaaaagtctggagaattaagaggaggggcgaatggggagggatgtttggcctggggctgaccttatccgaggttttctccacgtagcaggggtcctgaggggcagccagcaaggggacaaagcccgagagaagccgatcctcttccaggataagaagggtgaggtcatcatccgggtccttgtacagtggcacctcagactgattcactgcagtcagtatgttacagaaatcagccagcgtcgaccatacatccacagcaacactgtgagaaataaggtaagaaaagagcagctctaaagagggaccagtaaaaaaaagtattctcagtatttgtgagcagggaagtacttgcagcaaatgttgtctaggctggcatctgccaggaaatcataccccaaaaatgctaggaaacaaaactgtgcccaaggcagcaatctgaggtatgtgtatgtggatttatgcaaagttgaaattgattagggggagtttttaatcctcaccagagaggaaaaagaatttggagactcagttgcctaatgcagggtcctgtcatctttccagacagtgtgcctgagacgcttactcaaacactctagacacccagtgcttgtggctgctcccagaattccccactgctgtccagccaagtacatgccacacagacagcaactgagcaccagcctctcctcctccagccacagccatggagggtctagtcacaatacagcaagagtcatgcatgttttcctcctacaatgctttagaaatctcttccctatatataggcaggcaatcaatcaatcaatcaaccaatcacacaaacaaacaaaaacctcattcctggcccatcaagatcctcacaggaaggtaaagcctcttacacaattcatcagcgctgtctcagccattccacacctctcctttctctcatttgtggaaggtgagatacagggtgatcaactattccggtttgtgtgggactgtcccagttttagcactgaaagtcccacgtccccagaaaccccccagtcctgggcaaactgggatggctggctgtcctaattgcgtatcaccaggtcctggctgaacctgagaagaaaccttgaaactgcaaagtctggctctccttaattgaaatttcagcatagaattataaaaaaagaggttcatttctctgtcaccatcacttgtcaaaaatcgactgtgggtcagattcctgctttggtgggtgctgaggatccataaagcttttttttttttttttttttttttttggcctgcccagggatactacaaattgtggtaagcatatagggcctgccaaggctacagacttggctttcttctccaggaaagcacctaaccaggagtctggaacagataatatcctatggatgctaagttttactctaaaagaagagagatgcataggagaattacaaagaaaagcttcacaattagattcatgagctagagtggcaagaggcaatatgtaaagagagctgtaagaatcatcctgggcggggtgtggtggctcacgcctgtaatcccagtactttgggaacatgagaagggaggatcacttgaggccaggagttcaagaccagcctgggcaacacagtgagaccctcttgctaaaaacaacaaagaagaatcatcctggaatctccccagtggagttactgcctatgagtcctactagggaggggcctcagatctaagcaatttgtttctcctggagaccaagaatctttgggagatggcagaaaagaaagcattcaagggacatgccaccgaaggtgacagtgggggagaaagtggagcagaggtatgggaactccctgactggctccaggtggaaggaggctgcaatggtttatttactgtaatcattgcactaggaaaaggcaatgaaatgaaacatcttgttttcaagagtgtcctgggaaccagacggaacacagccccattaatcacacaacggcacataatcaacacacgtgtactgcagaagtaactcgcttcacaggctttacccaggaaaaagaacatgtttgggaagaatcaccggagggacgagttttctaaagcctctctcagcgcagacaccgacaaccagactcattcacaaagctccatcttttggctcagccgggtttggctgtcagaaatgtttaaatatggaaaaaaataaacagttgcaacacgtttctgtgcagagatctgcctgagctcctttgtgatgtaatgggaaacgcggcattcaggctaccagctgtagaataaacagaacttcgagggttaaaaggaactgaactttccacgaccccatctgcagagaagaaaataataagaggaatgatgcactgccccacagccctgatagtttatcctccggtcccggctgcagagacaagcaccggatgtgatagggctgctcagggccgcctccgaggttagtgctgcccatgggagacgcacagggaggctcttccagttccccgcttcctcccccagtgccctgctggccacttgagcccgctgcctgagtctgatcccacagcactggtgagctttggccaacaggcactgctcggctgcagagcagcaatttggaaaataaacaggaaagacgacagtgagaaggaagaaggtgaaaagtctcccagctgaattcttggcttgggggccctggttggtgcgtgcaggtcaaggctgctgcaggacatagttgggggttgggggtggtgtgggcagcagcatccccagccagagagaggcggccgaaaattacccacggctgccacagtgggaggccccacatccctctctcatcctcccacccctaccatcttggatccaagatgaagaaatatgtggtaccatgtggttctcattaccatgctctcctgtcccctaaggctcagataaaccaaaactgactcctcccagagactgctggccaccactagggacccctgcccacatacgcctttttgcccattaccacccaccttgtaccaaaaccttgagactcactgcaaaaataaggtggacgagaatccctacctcaatgttgatttgtaagaaagcagctgatgccaaaagacacagggagtgcccagagttcccaactcagaaatataaataaaagtggtccaagagccaagctagactgtgcagaaccaaggaaatacacaaaatgcttcaatgagaggtcacttctgctctggttaattcaaattggtcttgtgctctgattgtgagtagctgccttcttctggtgtttcagtgggatcacccaaactcagttcacattcatatcatcagttatctcctttcatcgaacaccacagacatgaacacaacacaactacccagagacccatgggcgacacagtgactctctacaggagtgagggagtgtcaggaaactcaaaggaagaggtgctttgaaaaaccaggtgagatgtctgaactcaaaagttaagatatttgcaaaaggatgaggtaattcctggaagctgggcaacatcacctcagcttaccccaatcaggcctctgggctgggaggtcagttctgtgggtgcacataggatttcctgtctgtagaaggagaaaagcttagctttttcctgctttaattcctcatcccaaccaggagcaccttctagccttcacccgacagcagcccttaggccctatggattcaaggttggccagggccaaggagccaaaagtcaaattcgggtggcgatgaggatctgtaaacagctgccaatcttttggaaatgcttgggaaataacttcccagaaggtttcccaaataatctcaaacaacttttgattctaaatggaccctctagagtgctgtggactcatgcaggtccttctggtttgttctggttcaatgcatattttagggaaattcccagagtccacaatatcccgctaaagttagggtggactgttcaccaagcagacacaaagcagccagagaatacgcaactgtgtccaatgagcctgcttatggctcccagaatgatggccagggagtctctcagcagctgtgatgtgattagagagcagggatcagcagttgcaaggtgacccactggcccaaccccacagaacacaccacacaccaggacggcagagccctggctggagtcggaaagccagatccgagtttgggacaaaccagcagtgactagttacaagtatgcactcagaaccaaggctcacttgcttccctacagacatgcattcacttagtccaccaggaaaggaaaaaaataagagttaatttactttttattgcctcagaattccaaggtttaatgtatctgtcagtttgagtgcagtgcagctgctggccgatacaatgcagcccaggccagcccaggtgactggggaaacacatttcacagaaacaaaccaacacacactcctggctggttgtttgggggatattgactccggaatcagattaacccttcaggctgaggtgagttctgcaaatagctgtagaaaggcagctgacgtccagggaactgagaagccctgctctcagaggggccatgggtttctgtgttcctaaaattttgcttttctcacaggagaggttacccaactgcagcatcctctgacagattaaggtatgccaggtgagacacgtcacaccacaataatctaccttcttgcccagaactcagaaaggcagtctgccagcttcatagggaaggagtcaggcaggactttttctgaaagctccactggggcaggactgagaggaggagagagtctgaaaagagtggagcaccaacgcctgaccaagactcagtccatcttcctggcaagtctaaggaggatgaggcactcacacactccttcatattttactgggggaacaagctgactggtgattaacatcaagtacaatgaccccatgttacaagcctgctggggcctgtggaggtggccatttcctgtgtaataccagcttgtttaaacactaacattcaaactccacagctgcagaacaaacccggaaagagttgagtgagaagaagccgtgcattgtgtttcagagctatggaagatcagagaagcagtacagatgggaaacaagttgggtcttctggttcctggagtgaggagatctggaaatacagccaagatggcacagaagctaggcacaaagaagctgaaaaagaggacacccatgtggtacagacacaaagacaaatggctgtaacaagagaaccacgcctaagacatgcaatatctgccttttcaaacggtttccctgtgggccattatatcctagcctacaactgtccacgcaggggtcagaggctaacataagaccactgttgccctggagagcttctcactccactggagaaaactgcaggaattcagcagctaatagcagaaatggacttgaatccaataagtgtggcagagttaaaagaataatacccgggcttgaaatggcttagcatgcctcttggaaagccaagatgtcatgccaactctgtttgcattgggcgaaggatttgattctggtacctcagtgctaggtagctcaagaggccctgggctgggctggagatggggagaattctatgcggctcctggagatttctagcaacaatgtgtcatccagatgccacatgatacaaagaagagacaaaggtatcaaaggccaccattccaggagttaagatatgagcagcaagacaccatcctctaagaataagagatgtttgctgggtgacccctaaagagaccagacttagatgaaggtaatcccttctatctttctcatttataccaacaagtcgacttgggactttgggagagtactcaccctaaatcaattttgcccaaaagggcaaatcaaattctgaagcttagtcatcctgccctactgcaagaatataaacctctccatgttctaagcagggcagctggaaccctatggccagcaataggtcacagtaacctcgttccaggatttctcaagtatcagagcacctcaaccatccactgcccccaatatgttcggggtcggcgccttatttgatttcagttctccaaagccaccctcatatgtatagcctctgtcatatcactatggtgtgctaaacccatcagcactgtatgtttgggaaagagcagcccctaggggatcctgacatctccacggcatgagtggagccctcggcggcctccctggtgcggattctcacggttcctgcctctccaaacttttagctgtaaccactccaacacgtcttcttagcttagcacacactggacccaaataacctcagctcagagctggaaagtactctccctggggtcagctgctgtaccctgctggggtcagactggagccttaggccaacaccccttcctctcacaaggagtcctacgggaggcgtggggaggggacaggggctcctgccgtgggagagatcacgtgtgccccacactcagcacttggaggaagaggaaccccctggtgccaggctgcagtgctaacgccccaacccggagccagggagactgggtggggagccagggtagcaaaggggcttcccacagccaccaccacttccttcagggaagtgctgatggactattactcagtgacctcctaaaatgcccttttgggaaggcatattaagtgtccttgaaggggtgccgattagccttgggattagttcttatttcagagctgccctatgaaggtgagtgaactagttgttttttaacttgagaatttctatctcatctacagagtcaacacatggaagctccctaaggaagtcagcttactgcatacgccctacgtatccctctttctccctatgtgacaagacctcagagggctccctacgacccttctccagtgtgctctgtagactatggaagacgatccatggaaaagcagcaagtacaagaatttctagagtttttttttttttaaacagtactccaatccaacagtgtgataaatgcatccgagctacaattaggaagatatatagcatcagaatgcgaaggtctgggcagcctggtgaaacgcgggctctccagagccccagctatgtttcccattatgtaaccctggtcatgggcagacagccagactccaaatgaaaaagagactctggcttggcactggttctattttcctatcctcattcggggtcagcgcagtgtcatacagctgcagagaaagctctggggattaaacctgggaaagcctccaagaccaggacctgggttcaagtaccagctgaaagcaataaaccaactgccacagctgggctaggtttggatgttctcaaagtcccctgactctttcacttactgagaactagaaatcaggataagtgaagatttggcctcagcagagactgaaatgaggtaggctgtcccactgccctagccttgccaaaggtcctgggatgcaaggggtcactatgctcaggtccatgaagcctgtcgctctactcctctccagcacgactttccttgtgctcacttgccgaagtaggggtgcagctgcctctcccttctcaccagaggcttggtgtggatgggaacacaaactatgctagcagatggggcaagtaggtgggccctccaaaccaagcagtctgtcctaaacacacccagcactctacattgactttcacagtggccccaggccactttccacatcctgctataatcctctataccaataatctcctgggattatgaagccattctgttacaatccctaacgggtacaactggggagtcaacttgcttccatccatgctggctctaacacacagatctaataagtgccacagcgagggaaggcacacatgcccacatgcccagcaatcctgccctcatcactctgcagtgccaacgatactctcatcatcatcctaggtgttccacatgtgcctgctgttgtggttttgactggaaggaagaggagcatgggcaaagaggagagaaccaaggaaactcaagatgaaccctggaattcccctcagagaggggaagatgctgtgcaatgattctctaactgcataaggaaagagggtaacaaattaaagacagggagggaatgaaggaagagagatgaaagaagggtcccacatgtcagagggaccatttggaagtggggtttctggaggaaaagcaaaggagacttcctctttgtaggaaaaacaggctctctggtcaccttatcttaggatcagagaaatgtatctttgcaaagaagaaactcaggcaaagaccaatgaaagcatgccaagaaggggcactaaacagcagccatttcattcctgctcccttgggagcatttccaaacccttcaaaacgatgagcagcaacaaggactttacaagcgtcaggggggttacagttttggcatctacagaaccattggggtgtgttattctctatgaccttaaaagaaaagcctcttcaatctgtaaggtcagtgggcatgagattaagtttgaaacccacaaaagcaccatacctttgccaatctctcaaccagagtatttactcagtgagtattaggaagctacatgagaatatgggaaacaaaagaaggaaggtgcaattctgattccacttttccaggcctctgatctgaagactctgaggtgggactaccctcagtggtagtcaggccaggtttgctctgttgaacgcgggcaccagtccttaaatagccatgccttggggtcaggccccaggatagcaaagcctctctttcatgcttaaactcgcattccagagataaccagctgctgatcctaactgcagagagagaaagaaagagagcacagaaggagatgtttttctctattacactgttttatctctctagcccggactggcttcacgagagagtaagtggtatccacagctacggtaacgtatttgctgggtaattaaattcaatatactatttggtcagatttgctctcctcgtgaagaagtctgagaagactaagcaaatatgactcaaatgtcccaaccccctctgcctctctgtagcccagaatgtgaagcccagccggggatggctgtagcttggaccacgtgcctgcctgtagattgagcccttgcccaaagatgggcagcagctcagagccggcaacgggccatttgctgcagcatccaaagagaaaacagactcagcatctcaagcaaatgagacccagcacttcctgtgtgagctttccatttcctcagccgaacaaaagccaaaagggagtgagagagggaggagggatgaagggagacatgctgcgtgagagagctaacagacctgtggcccgggatatgggtaaacaggggctgtgtgaatcctatctaagagacctgtggttgtgaggtgaggtgacccggggaaggcccaggctccaaggacagatggtctgcctccccaccctgagagtaaggaagggacactcagtgacccttgtgcatgctcagaagcagtggcttagatacttggagaactgagtcctttcttggcattttcgttccaaaactgcaaactgcctagtcctcattacagattaatagcctgaaaagtttgaggctgtagatgttaactctttggggatcactgctgagaaacagctgtcccctggccagcagatccgtcagttcctttgtgtggccccagctgcacagcttggagctccaaggcttcagcctggagtgcattttggaaacctaggagggcccacagataggatgcagagaactgtccgatgctgtgagtgccgcccacaccgttacagagctagaggtggggagggcatggggagactgagattaataacagtccagggggtacatcttgaggcaagtacagggaaaaaatttagaaagaaaaggggaagaatcagactacacagtccacacataaactgctgcccagaaatctctgctttagccttccctctggaggttacccatgagtctaggagactcacatggctggtccccaagtcaaacaagctcccctccctactccccaaaagtgccctccaaagtagccagggtctccataatctatcccccagcattacttctctccagagaagaacactggagatgcttgttctgaaacacacataaatgcataacacagagcatgaaggagctttgggtacacagcaccagccgaagaccacactgagagaatgtggggtaggggaagaaaaggaagagggaaacgagaaatggccaggggggtggggtgggcaggggtgaaacagagaaagacagagacactaaggaagagtagagataagaaagagaggcccagcactgtgggaggccgaggcaggcagaccgctttagcccaggagatcaaggccaacttgggcaacatgacaatgccccatctctatttaaaaaatacaaaaagttagccgggttggtggtgcatgcctgtagtcccagctacttgggagactgaggtgggagaatcacctgagcccaggaggtcgaggctgcagcgagctgtgatcgtgccactgccgtccaccctgggtaacagagcgagaccctgggaaaggaaggtaggaaggcaggaagggagggaagaaggaaaaagaaagaaaaaagaaagaagggagggagggagggaaaaattaaagtgagcaggagggagagatgaatagtgaacagggctgaacagagatggagcctacacgcacagttgtacaaacatgaacacacacagtgacactaacacaaagaagaatgtgacacatggaacatggacagagattgaagtcagcaagctttttctgtaatgagctaaactgcaaatattccaggccgtgtgaaccatacagcctgtggcaactactcaactctgctctgtaatgtgaaatcagccatagacacagtgtaaacaagtaagcatggttatattccaatcaactttatggacactaaaatctgacttttatacaattttcatgagtcatgaaatagtactcgtttgattttttgtttaaccatttaaaaatgtaaaccattattagcttgtgggccatggtatgctgatccctgatacaggtgcgtgcgacacacacacacacacacacacacacacacacacacacacacacacagcagaggcagacgaaagcagaggcaaagagaaagacagaggcaggcaggcagagacaggccaggacagacagacagacaggtaggtaaaaggcaaggcaggcagatacaggaagacccacatacacagaaaccccctctaacagagagatccagactggcatacagagacatagttacacacaaacatggacacaacacagacattcaggaacacatactcacagacccagacacagacacagactgacatggacccagaatcagcacagacacagacagatacactggtctgatgtggtggctcacgcctgtaatccctgcacttctggaggctgaggcgggtggaccactggagggcaggagttttgagaccagcctgaccagcatggtgaaaccccatctctactaaacataaaaaaattagccaggcctggtggctcatacctgtaatcccagccacttgggaggctgaggtgggagaatcacttgaacccaggaggcagaggctacagtgaactgagatcatgccactgcacttgaacctgggcaacagagcaagactctggggggaaaaaaaaaaagggccagatggggtggctcacacctgtaatcccagcactttgggaggctgaggtgggtagatcacctgaggtcaggagtttgagaccagcctggccaacatagtgaaacctcatctctactaaaaataaaaaattagctgggtgtggtagcacatgcctgtagtcccagctacttgggaggctgaggcaggagaactgcttgaacatgggaggctgaggatgcagtgagctgaggtcgcgccattatactccagcccaggcaacaagagcaaaactccgtctcaaaaaaaaaaaaaaaaaaaaaaaggctgggtacggtggttcatgcgcctgtaatcccagcactttgggaggctgaggcgggtggattgcctgaggtcaggagtttgagaccagcctggcccacgtggtaaaaccccgtctctattaaaaatacaaaaattagccgggtgtggtggcaggtgcctgtaatcccagctactcgggaggctgaggtaggagaatagcttgaactcaggagacagaggttgcagccaagattatgccactgcactccagcctgggagacagagcgggactccatctcaaaaaaaaaaaaaaaaaaaaaaaaaagacagctatagatgtggacacagagacatgaaaacacagacatacactgaaagaaacctacttggggacacatgaatcccatacagagatatatatactcaaggatatacagacacaaacaggtatagacacaaatacagacatagatacggacatcccacatgaacacatacagataacaacacacgtggccacagttggatggatgcacatggacaagtaaacacagacagacatggaccaggcacacggaaagacccctagacaagcgcccagaggcagacacacagaactttgcgctcagatacagacactaagacacacacagacttacagacacacagacaaatggacctagacaagcacagagtcggacacaacccagacacagatatagacaaagataaaagaagtaaccatatggggttccacaacactctgtaaatgtaatttatgtcaccgaacttagaaatagttaagatggcaaatgttacatctatctccacaattaaaaaaaagaaaaagaaaaaggtatacaaacacataaactgatctacgtaaatacacccagacagacacacagactccaacacctgcccccgcccccaatacacaaatgctctctgctatacacaaatgctctgagagatgccagactgacacacagagacagggggcgagggcaggctcatggtgagaagacaggggatgagggtgagggcagaggcatggtgagaagacggaaacgagggcgaggtgtagtgagaagacggggacgagggcagggacgtggtgagaagacagggggcgaggggagggacgtggtgagaagacagggcatgagtgaatggaagagagatgtgcatgcattcagcctccccacacgctgccatgccaggagacaaactgcagaagacagcacaagcagcagtgagagagccttaaagatgcagagaaggctgggcatggtgggtcatgcctgtcatcccagcactttgggaggctgaggcaggtggatctcctgagctcaagagtttaagaccagcctgggcaacacggcgaaaccctgtctctaccgaaaaatacaaaaaatgagccaggcgtggtggtgtgcacctgtggtcccagctactcaggaggccgaggcaggaggatcacatgagctgggaggtggaggttgcagtgagatcgcgtcactgcactccagcctgggtgagctgagatcatgccactgcactccagcctgggtgacaaagtgataccctgtttcaaaaaaaaaaaaaaaagcaagatgcacagaaaaactaataagagaagatacaaagtctcacacacacatatccacacaaatccagactccagaggcagctgcagagatggtgagtatgcacaatatggagtgaggatgagggaacgagagcaagaacaaataacaaaatggagagtgagaggaaaaagagagtgtgagaggagggggaagaggcctggagaacaggaaaaaataacctaaaacatcagaggatagggaaggtattcaaaaaaagttcaaataaagaagaaatagagaggcaggcaggctgtgggcagaaagaaacagagcaggatgaagaggggagctgtaggaacacgggcaggcccaagccagtggtgctgaagcaatgggcaggtcaactcactgcgagggcagatccagggatgtgggaggaggattccaggtgtccgggtagccgagcatccaatctgaccagactttgacactggggagcagctccttcaggtccgggacaaaggaagacaccttgatgtcgtcttggtcatcctggtcctcaggagaggacagctgagctgcagaggcaaagggtgagaactgggcctatgtctgctgtagcccccgagtgaggcctggggcgctgggacggcagcaagctcttagggaagggagaccaagtccacaggaaagataggcccagaagcgaggacaagcgccagcacctaagaggattctgaaaagtaggacaaagagagaaccagtgtactgggtctgcccctggacacaactgcttctgcttcacctgtggcttggctgaagcctctactctggcctctagcccacccttccagccttccttcagcacagtaccaagatggcaccagagttcttgccaaaactgcatgacctgaatttaatcacaaggaaacaccagagaaacccaaactgtgggacactgtgcaaatgcttcatattcttcaaaaatgacaaggacatgtaggacaaagaaagacagaaaaaccatcccaaattaaaggacattaaagagacacgatgatatctaaatgcaacgtgtgctcctgcactggatcccagagcagaaaacaacttttttttccccttgctataaagaaattagggcaactggcacaaactaagtaaggtctgtgaatgcaataatagtattttgtcaatgttgacttccgattttgataaccgttgttaagagaatatccttattattaggaatatagagtcaagtatttgggggtaaagggcccgcaactctgtaacttaaaaatcaaatggttcagaagaaaaataataaccttaagtatgtgtgtatggaaagacgaacgtaagcccatatggtaaaatgttaactggggaatccgggtgaagggtatgtaagagttctctgcactattctggctactgttctgtaaatatgaagttacttcaaaataaaaagttgcccttctgtccctaaaaaaaaaaaaggcagcctccgaagctggaggcattcacaaagctggtgcggcatggggtgacagtggggtctcattaagtcactaatattgatctaggagctgaaaagaaaggtgtaaccttcagccctaccttctactgctacaacaatctggcttagacttctaagggcagccttaaaggatatgggatactgtctcaacctaagggctaaaaatagcacctgctctatctggtccagtgagtctcccatgatggctggtccacagcggttacagaactcaccaggtaccacacaaacagaaacaaagagataaaggggaaaacacaacgtcgattatggaaactaacttttctggtttcctgaagatgcaggaacatgcagcagctcataggtacagtgaaaatcctaactactaaaggagaaaagagagaggaaagggttctacaaaaaggagaagagggccttagaggcaatcagactgtaaaaggaaatgggactagttaggcaggcaaaaggaagaggggcatgtaggtaagaggaagaatggagactacagggagaagacaccgagaaaacagcatggcactgtgaggtctggacaaggccaggcaactggaaagcccaccaggctggggactcctcctgcttacctttggcggactccttaagtaagcaggtgcagcggcggaccagtagagaaaacatggccaagcccagagctgcggcttgttcctggatcacagagcggcactcctccgagaagcagtctgcggacaggcaaatgaaactctcagcgccccaggcggacaagatgcacatcactggccacgttaccgagcttccttttcctcactgaagactagggctagtgatattccctctctcagagtggtcataaggccaagtagaaaatgcatgtgaagcacttaccatgaggtctggcatatggatatgtgtttgataagatgataagggtcacctctgtcaattctacatcactttcccaggaacggttacctcaggaagggcagtctgagctggagctgcatggtctctgcctttagctgcctactgataatgtaaagccatcgtaacaagaactcagatttaattaactcagtctctctagtgtataactaacaggagcacagtcatcagttaagattggaaaaatacacatttaaaaatgatcttctgtctactgccataccaccctgaacgcgcccgatctcgtctaaaaatgatcttcttgaatcaccaacctttagtcccatccttacttcctccatgtccctcctcctaagaaaacacacatgacacaaataacctactttcatggaatgagttaattttatgcagaacagtgcttggcacataataagcacttaatcagtgttggcttttgttttcacaaattccttcccctagcgctaaaaaataaacctggctcccaatcccagtaccctcttcccgtcactttttcagcctggctaactaacttccttctggctccaggtcaccgaaaggagccatctttttggtgggcagaattattctttggtgggagctatgtggcatactcccaaaagcctgcctgtacctactcttcatcactggccttccctgaaagccacgtcatctgaactcgagaggagctggtgacacacagaaggcagcagtccaccacacagcctccgaggaggagacaccacatacccacaggagacagaatcaggggccaggctcactagctctggcagcagctaatctgtgaattccctctctaatacaggagaactctcagaatctccaagtgttaaaaggataatcagctgaatgtctgatctctgtccctgcctgtattttaacctcagtagccaaggggagccctctcatcagctcaccagtcttgtcaatggggccccattgaagttgttactccaggagacaatacccaaccacagtgattccttaccatctttgccccaggagcaagtatgattggagtacacaaagccagccccaacccacttctgaaagtactgggtgtaagaaggagcaggctgctgctcagaagggcccaacaaacgaatagcatccagggtagtaattctttgattgtggctttcccaccaaccttccagatgcccactggtcccagatgtcaccctctgactttccagctcaactgtggcaggcagttaaggaagtggtaacaatccatgtgattagaatagaccagtctcactcctgtcctgttaaggccctaaacctctgttacaaagaaaacaagcatgcaagagccaagaagaggggaggatggaaagcaggaaagggggagatatgtaagttgtcaagaaaagttaccaacttctccccttcaccctccccataggcagcagcactgtcagtaccgcccagctcagtccaggccattgccacgcccggacaacatcctgcctctaactagcaacagagccgggaagaagggagtaagtccagaaaagagggagttgggagaagacaagtggaggccacatcctggtagctgatactctgagtaaacattagtgcctcctcatcaactaagcagaagttacctgcactcagaaggctagaagggatggaggggggtgtcctggctccaagagactggcattttatgaagcacaggctacactaagacactcccatgaccctggacagggataagacaggggaggtttctttcaccaagcccagttctgtatttatgacaaatggcaatcacaagctagactgtctctcagagttcaaggtgggggctagggctcagagggagaatggctgcttaacaacaatgggatctgcggtcttcgtggactccaggttggctccttttctaaaggctcctgcaataaggtctggagaccaggcaaggtagcaacagctggagtctctttggtgtagatctgaaagtgctcagccacctcccagggcagcagctagaaggcagcttcatgactgctctgtccttggtgacggttatgtcacctcaactccccatcccctaaccccctcctgaagaaaggcttgaaataacactgcctgcttatgtgtctggtccatctgatgcggagtattaagcagtaactgttctgctgtaatcaagcaggtggagattttacaaacgatcaagggggtcagcatgtctgagtgttggtcaggcctctgactggccatgttacctagagcacctcctggaaggcctgtccttctccatggctcagtagtacctcaagcacatactgagcatgtagaatgttccagactctgtactaggtatgatggagcacacagttacaaataaaacatggtctctgcaaccgtaggacctttcaatagggtaaagaaaattgttatttatccaagtatccacggcaacttggatccagtgcctcaagtgagacatgcactaagtgcacagcatcttcatgggctgctcttggcctcacgtaggcttccacaggctagaaaccgtaagacgctactccctgaaagcattcaccgttacacaagtgggtaggaaaacagcatctagattcccagagtccacccactttggggctagatctaggaaactggccctagtctgatgaatgcccatatatatccctagtgttgggctgggccaagccaacaagtgatgtggggtgggggaggaaaaggcattgtttgccttggtattcgcctgggttcctctggctttgtgtcaggtagcaggagcatgacaggagctgaggaactcattaacactgtgaaacagcctttccccttctttccaaaagcagagacttgcttaagggtttcgggtaagggttttggctaaggaagtcagacggaaatatttcttaataagaaagtcacctgaggtctgaacttggttctgctccttcccacatgtgggcaggtgaccacagctcctattattcctatggccaaataccggctcggacagaaatattcttcttgctcctatgtaacagggagactttctcgtttttctgagaatatattcatggaaaacataaaccaactgtcgtcaaagttgcatgaaatcaggaaatggagcggccgggagaaggctgccatgtggccggatgttatgtatttctaattagtgctatacatctttcaacagcaagtgtccttctgctgggaaacacaacacactgcccttgttattgtaactgtcagagaagtgcttaaacagataatctccaggaaaagtgataaacacgtcccctctcccaccagtatgtgtgcgacggtgctgccaaagcaaagctgtgcctgacagctccaggatggcaaagcatcctcctgcaggaaatgggagtgaggcaggaggggcggagagggaagagcaggggatgggaggcaggcccacctgcctgggccctctaagccgagccaagggatggtggttcagaaccactgcttctgatcaattccagtgttgccatcagggagagatttgaaggaaaccagtaccagtgggatggagtttggttggtcacagaaaaatctggcagcgatggaactatcagagttcccttggtgcacacagccagtttcctggcaagagcataagaagagtaatgaagagaagacacaggatggatgacacctaagtctgatgctctgatagcagcagaggggattctgagggcactggggtccacgagccattccagcccagagaaccaactatctgcctggctgcatcactaagagctggagaaaaacgcaggcaagaccacttattcaccaattccctccccactgtctcctcccaaagaaaggaaatgaatggtcagtcacctccaaactaccaccacctggaggcaatttgttggcccttatctttccgacataaggctgcttttctcatgagtcagttaccagtcagacacaaggctggcacagttcctaagcagcccaccaaaacctccttgtctacaggaagtgggcagtgagagtatctttcaactgctgctgcttgagccacagagttccccgtggcagctgctagctgaagaggaggtagaggaagcagtcgctgtataggaacgagacaaaaacaaaatctcagagcaaaagcagagatgtcttttcatcattttattccctgaggagcagaacgaatgagtcagcagaatcaggcactaatacacccaagcaaattattcatgcacaatggcaaaacagaggctgactgagtgtaaagcaagtcataacatttccctaaactgatacagccaagtgacatggtggaatatttgtccccacccaaatctcacgtcgaattgtaatccccactgctggagatggggcctggtgggaggtgtctggatggcagggtggatccctcagggcttgggtgctgtctatgtggtagtggctgaattcttgcaagatctggtccttgaaaagtaggtgggactgccccactctttgctcctgctttcgccatgtaaagtgcctgctcccctttcgccttctgccatgattgtagccttccttaggcctccctagaagccgaaatgcttcctgtacaacctgcagaaccgtaagtcaatgaaacctctttactttataaattatacagtcttaggtatttgtctatagcaatgcaagaacggcctaatgcaccaagacaagacagaagaaggtggaaggtaatttcctccctaggagccctcgctgtcagtgttccctttggattttcttctaaagctcttctgaaagtagggaaatatgggggcaaaggaaatcccaatcttctaacaaaatgacttctcccattaattccgaaaacacttgagtgcccaattgtggaggatataaaggaaagtaggatcctgtctgggagaagaagataatctaataaggaagacaggaagaatacatacctactcaagtaactataattcaagacaatgtactacatatcataaggaagatggaagtaagatgtttctgtcaccagagggagaggaaaccatttcagctagcatgtaacagagaaggtttcatggtagagacctttatttttgagacagattctcactctgtcgtctagactggagtggtgcagtggtacaactgtggctcagtgcaacctctgcctcctgggttcaagcgattcttccgcctcagcctcccaagtagctgggattagaggcacgcacagtttcaccatgttggtcaggctggtctcgaactctcggactcaagtgatccacctgcctcggtctcccaaagtgctgggattacaggcatgagccaccatgctcggccagaagagaccatttctaaggtgggctggaagagatgaacaatgatggagttggtggatgcaggggggaccacatgtactacttgaggcacgcaagtactgtgtgtgctgtgctctacctggaaccacaaagtatagggcctgcaatgccagaacagggaacatgaacttgactcaacagtgagggagcactcactcaatgttcttggatgaagcaatgagtgaatattttataaagattaatctagctaaagcatttaggactaattagggtagctggaaaaaggtaacaatgagggagaccagttgggaagctaagagagcatgaacttgtttgaagcaagcgaaattacatgtaaagcactcataaagtttataatgccaagtaagggtaacatcttcttataatagaggtagaagagggaatgaaaagcagtgcacagatatgaaaattaccgcagaaagaaaatcaaaagaggccaggaatggtggcttacgcctgtaatcccagcactttgggatgctgaggcaggaggactgcttgagagcccagtagttcaagaccagcctgagcaacagagtaagaccctgtctctaccaaaagaaaagaaaacaaaacaaaacaaaaaaaaaaagaaagaaacatcaaaagaggctggagataatgctgttgagggggtacgtaggggtgaagactgctggagcaggtcaaagactctcacgtgtattctcggcaggttccagaggatcctgaaaactcaagaagagtaacaactcaccaaacaagatccaagtaagggggaagaaactcaggactgcaaaacacctggagggagagaggtatgtgtcaaggagtccccaggctccctccctcttggctctgggccaagtcctgtctttccagaacaaagacacttcagggggtcagaaatacttgaggaagacctagcaagaggcggcctgggaagtctgaactggtgctccctgtggaagccattagatattcggcacttcatttgtttccaattcttgtacgagtacagctccaggctgtggggtgacaggctcctctctgacgtaatcaggaagcagctgcaaaattaaggaatccctcatgacatcataaaaagggtcgatggtttactggggaaagtataaaaattaattacatattcccacatgacacccttcccctaaatctgtacacaccctctcccacctccacacattctctcatcaacaacatccagaagccacctcaatggacagggtacaaaagggcaaacaaaacccagagaaggttctttgatgcactcacactgtctgcccacctatttggaacttaacaagcaataccttgtcctggaattgttattcatacagtaggtttcctcaacagaattataagccccttgagggcaagagctatgtcaagacttcacatccttggaaatcagcaccatagagaggttcaagaaacatttgctgctcataatagtaggcacacttgcctctctcactttggatctaaccatgaatgacatgattccactgtggccagacataataactaagacattttgagacctatgttaggcaaacaatatttatatatattatctcaaagctttacaaaaggattgcctgagtattattctcctttttgacatttgaggaaacaggctcagagagactaaatgacctgcccaataacacaaggctagaaagtgccagagctgggatctgaatccagttctgtctgctctcatgcccacattgtttgcatatctgattttcacacgcccgtgactcaagtgtcacactcccactgctcctctctcctttgctatgaacatgaaaagctcagactactccaaccacagtgctgcacaaagagctcagagatgatgactgtgtggaagccaaaatgaaaaacatgccatcgtttacaatagtgacaaagaaaatgaaatattcaggtataagtctaacagaacgtacggaaacgctatgctaaaaatctgaaaatgctgatgaaaatcaaagacaaagccaggcatggtgactcaacgcctgtaaacccagcacttcaggaagctgaagcgggcagatcacctgagatcaggagttcgagaccagcctggccaacatggtgaaaccctgtttctactaaaaatacaaaaattagctgggcgtggcggcgcgtgcctgtaatcccagctactcgggaggctgaggcaggagcaggggaatcacttgaacccaggaggcggaggttgcagtgagccgagaatgcgtcattgcgcttcagcctgggtgacaaactctgtctcaaaaaaacaaaacccagaaaataaaagacaacctaaaaactggggagagttaccatgttcatgaactgagcaactcagcattgtagagatgccagttaattgtttaacgcaattgctatcaaaatcttaggaaggttttatgtagacaatagatctataggtttaacgcaacagctatcaaaatctcaggaacgtttcacgtagataaagacaagcttattctaaagcttatctggaaaagcaaaggatgtagaacatttcaaacaattctgaaaaagaataaagcgggagaaatcgttctccctgatgttaagttaatgaagaaaggggccgggcatggtggttcatgcctataatctcagcaatctgggggaccaaggcaggactgcttgagatcaggagtttgagactaacgtaaacaacatagcaagaccccacctcttctaaaataaaattaaaaggaggaatatcttttcaacaaatggtactgaagcaattagacatctgtatgcaaaaaaacaaagcaataaaaccttgacctaactttcacacttatacaaaaattatctcataatagatcgaagacttatatataaaacataggaccataaaactcttagaaaaaaatggaagaaaatcttcaggacctaggactaagagttctaagacttaatgccaaaagtacaatccataaaaggaaaaactgatatactggatttcataaaaattaaaaacttttgcactgcaaaagaccctgtaaaaagatgaaaaggcaaatgataggctaggaaaatctgtttgtaaaccacatatctgccgaagaactagtaaccagattacatataaaactcttaaaacctggccaggcgcggtggctcacgcctataattccagcacgctgggaggccaaggtgggagaattgcttgagcccaggagtctgagaccagccctggcaacatagcaagactgtgtctctaaaaaaaaaaaaatttaattagctggatgtggtaacatttgcctgtagtcccagctacttgggaggcagaagtgggaggatcacttgagcctgggaggtcaaggctgcagtgacccgtgacagtgccgctgcactccagcctgggtgacagagaccctgtctcaaaaaaaacaacacataaagaaaaataaacacaaaccaaaaaacaaaaaacctctcaaaacttaacagtaagaaaacaacaatacatttagaaaatgggcaaaaaaaaagacaaaccagatatttcatcaaagaggatatacaaatagaaaataagcacaagcaaagatgttcaatataattagccattagggaaatggaaaataaaactacagtgagatctcattacatatctatcagaatggctaaaataaaaaacagtaccaccaccaaatattggtaaggatgctgggaaattggatcacatgtacgttgctgatggaatgtaaaatggtatagctgctctggaaaatagtttggcagtttcttctaaaactaaaaatgcacttatgatatgatccagcaattgaactctggggctttatcctgaagaaatgaaaacttacgtttagaaaaaaaaccagtatataaatgttcatagcagctttattcataatggccccaaactagaaacaacccaaatgtctttccacaggtgaatggttaaacaactgtggaatatccgtaccagggaatacagggaatactactcagcaataaaaaggaatgaacaaccaatacgtgcagtgagttggacagactccaggaaattacgcttagtgaaaagccagcttcaaaaggttatatactgtacaatcccatctatataatattcttgaaataatatatttatagagatggaaaacagattagtggttgccaggggttaggattgggggctgaaaggcggtagggatggttctaaagcatagagcaggaaggagctttgagtgttgggaaagttctgcatcttgattatagtaatagttacatgaagctacatgtgtgataaaattgcacagaaccccacacacacacgcacacaagtgcaagataacttgtgaaatctgattaaagtcagtggataccaatgtcagtttcacgatgttgatatatactaaagctatgcaagacatgaaaaatggggaaggacgggtgaagggtgcataagacctctctgtacatttttaaaacaacttcctgtgaatctataattatttcaaaataaaaagctttaaacaagtaaacacaacaaaaaaagtaaacccaagtaaaaccgaagaagatctgacacagcattccagaaagttttacacagaaaagggttactcagtcacttgggggatactttctcaattaacagtagctgattaccctgtccagatgctggagccccttgttctcatcttctgctgcctggcctgagctggtggagatgcccagttgcggctcctcaccagcttacacaagaaactgtcaggggcaaccagaaggaaaataaaataaaattaaaaaaaaaaaaaaaaaaaaaaaagaaaagttcactgaagacagaacttctgtctaaagaataaggagtatagcaagagaacgtcatcgtcaaggccgtgaatcactggatcagtaaattccacagcaagcagcacaagatgaaggtgatgagaaagtgaagaaagatgacgaatgaattgcagaaactgagcgagcagttaaaaaatgttcttgcttctcaaaaataaggtacacatctcaaaccaatggtatgcacattcttcaagaaagggcagtcagaggaaaaagcggcttcaaacatgagtctgagtactgttttcttcataaaggaaactacttaggcatttttggtgttgctttggattatcaatcagatggatattaaggtatttatttttggccaggcatggtggctcatgcttataatcccagcactttgggaggctgaggtgggagcatcacttgagcccaggaattcgagaccagcctaggcaatacagtgtgagacccaggaggttgaggctgcagtattgtggagtgattatgtcactgcactccagcctgggtgacagaccaagaccctgtctcaaaaaaataaataaaaataaataaataaataaataaataaaaataaaaaagatttaattttgatttaaaaaaatatttttgtaggccaggcacagtggctcacacctgtaatcccagcgctttgagaggctgaggcggatgatcacttgaggccaggaattcgagaccagcctgtgggccaccgtggcgaaaccccatctctacaaaaaatacaaaaattagccgggtgtggtggcgtgtgcctgtagtcccagctacttgggaggctgaggcaggagaatcgcttgaacccgggaggcggggttgcagtgaactgagattgtgccaccgcactccagcttgggtaagagagcacgattctgtctcaaaaaacaaaggtttgttttttttgtttgttttgagatggagtctcactctgtcacccaggctggagtgtagtggtacaatcttagctcactgtaacctctgcctcccgggttcaagcgattctcctgcctcagcctcccgagtagctggaattacaagtgcccaccaccacacccagctactttttgtatttttattagagatgggtttcgctatgttggctaggctggtcttgaactcctgacctcaagtgatccacccacctcgacctcccaaactgttgggattacaggagtgagccaccgtgcctggacaaaaaaaactttttgttttttttaagtgccagcagtaaatgaattttattttaggtaaactttgctgaaaagtggagactaaaagggattcaacctgcatataccttttttaaaaacgtgaatttaagccctgtattccttattttttttaattatactctaagttccagggtacatgtgcacaacgtgcaggtttgtcacatatgtatacatgtgccatgttggtgtgctgcacccatcaactcgtcatttacattgggtgtatctcctaatgctatccctccccttcccccaaacccacgacagaaaaaaaaaaaaaactttttgtagagacagggtcttgttttgttgaccaagctggtctcaaactcctggcctcaagtgatcctcctgtctcagcctcccaaagtgcaagaattagaggcatgagccactgcacctagccctagatatatacaaacagacacacatacacacaatttaatttaattttatttatttatgaatgagacaggctctcgctctgttgcccagggtggagtgcagtggcgcaatcatagctcactgtagcctcaactttccaggttcaagcaatcctcccacctcggcctcccaacctcctggtctcaaattcctgaactcaagtgatcctccggccttgaactcccaaagtgctgggattacaggtgtgaaccaccacacccggcccattatttattttttaattggcagcatcaactgcaatactctgataaatagcccctttgccaatgtatctgtaattacaaatcaaacattttctaaaaagtaggtgattttatcagaatcaaacatgtttgcttttcaaaagacaaaatgaaaaggaaagctacagaaaattatctcactgggagaaaataattgtaaaagatacatctgacaaaggactcagaactgaggtatataaagaactctttcaactcagcaaaataaataaaaaattgggcaaagaagatatatggatggcaagtaggtacatgaaaagatgctcaacattactaatcattagggaaatgcagatcaaaatcacacatacaactccatacccaacagcatggcaataataaaacagatggatgaacaataacaagcattggagaggatatcaagtaactgaaattctcacacactgctttaacaatgttaaatgagaccggggcacagtgactcacacctgtaaccccagcactttagaaggctgaggtgtgtggatggcttgcggtcaggagttcgagactggcctgatcaacatggtgaaaccccatctctattaaaaacacaaaaaatattgggcgtggtggcaggcactgtaatgccaactacgcaggagaatagcttgaacctgggaggtggaggttgtagtgagccgagaccacgccactgcactacagcctgggtgacaaagtgagacttgattcaaaaaaaaaaaaaaaagttaaataatataaccactttggcagtatcttaaaaagttaaacaccaggctgggtgcggtggctcatggctgtaatctcagcactttgggaggccaaggtgggtggatcacttgaggccaggagttcgagactagcctggcaaacatggtgaaaccccatctctactaaaaatacaaaaatcagccgggcatggtggcaggtgcctgtaatcccagctacttgggaggctgaggcaggagaatcgcttgaacccagaaggtggaggttgtagtgagctgagatcatgccgctgcactccagctggggcaagagagcgagactccatctcaaaggaaaaaaaaaagttaagtaccaaacgacccagctatatcactcacaggtatttactccctaaaaatgaaagcatacatgcacgcaaagaatgttcatagcagttttactcatgaaggttaaaaactggaggagaaaacaccaaatatccatcaacaagtgaatggataaataaattgtggtatatccacacagtgaggactattcaacaataaaaaggaataaactacttaatcattcgaatgtcaaaaacagactcacacctgtaatcctagcactttgggaagccaagaggagaggatcacatgagcccaagagtttgagaccagcctgagcaacacagtgagaccctacctctagcagaaaaaaataaaaaattagcctgcagtggtggcaggtgcctatagtctcagctatttaggaggctaaggcaggaagatcacttgagcccggaagttcaaggctacagtgaactaagaacatatcactgctttccagcctgggtgatagagcaagactgtgtctgaaaaaggaaaaaaaaaaatagagtaatgacatttagaaacacattagtctgacccttcacttgaactgttaagagttcataactggaggctaatttgataaagaaaagtagacatacatgagtacccagtaggtaacaaagccttggacaaggtgttttgcgtattttatctaacactcagaaaacccctgagaattggcactgataacctgctttatgaacaaagaaactcaacctcagagacggtaagtaaactttcgtcatcaaggtcacacagctggcaagtggctgagtagagaattctcgccctccatcaggttgattccaaagctctgtacagcattaccacacagctgctgccttctgcaggtgagacaatgatctccagaagtgctaggccccctccagaggacaccctggctttcccttcttctttatataggactccagggccaagaaatgtcctgggggctctatcaatacatcttggcaagaaagacagcaaaccatctactctctacaagaaaaaatgaaaacacttctaaatgggtgcttcccttgttccaggaaatacccatgcagtttcagaaatggtactccaatagatttcctggaaaataaataaataagtaagttgccagtcaaaacacactttggccatttccaccttagttgtgtctctggattgatatttttgttacttacaggttactgtctgagcccagagttattcaatacacatcccctcttgggcaggacagagctgctgccagcagaatagcatgctggcactggacgagtcccttagtaatggggcccaggagaacgagggcctgccattccagcatctcatttggaagagttacaagcagatcttgcaggacagagtttctgcttctacactgcttgccagacgttttgggaagcttgcctctctcccagtatttgaggaaaagcaaaggaagagtagaaaagcatggcaggtctttaattaaacaagacaggtagtccctatggaatcccatacagcagatatgaggtgtcctgtgtcaaaagttatttaaggttgtggaggagaagtgatatgaaagaggcttcctaagaggcatacccattagccaatctagaaggaagttttcctgttaacagtcaggagggagaaatatagctatatcacttttaataaagcaaggagagatttggctgctgattcagacacacaccttgaaacccacctctgctggcgtgaagcttcaggagcactttgagccagaagtaaaaattagggagggataatgcctgcagacaccctgattcagagaaactccattgacagggcaggcagaggggcagggaagtgttctgcttccatttttacaaattaactcaatttcttttcattctgtggcttcctgaacgattttttttaagagatggggtcttgctctgttgcccaggctggagttgagtggcatggtcatagctcaccacagccttgacctctcaggctcaagcaatcctcccacctcagcctctgaagtaactgggaccacaggcatgtgccaccatgcccagctaaggatttttaaaagtctgacagtgtttgtaaacaacgccaaaaataaaacaattccgagataggtgagacagaaaggtacctagaataaaaaggacctcttggaggccttctgagaagttagctttttcaggaagcttccagaatgtaaagattagagtcatcaaacaaactttgaggggtcagtactgaaaaataagaccaatgataaggcacaattttttggtggttaccttgtgaatatccagatctgcacattcatttgactctgctccagaaactcatcccaaaatggttcctcaaggcctcagaatccatgatcaatgtccaaaccaaactgcgaacgtaatgacttcatccaaccccacccactgtggtgcatctagttttaaagtagaggtcaggagaataataagctagataaagcagttatgccaaggaaggaagtgagaaagcagcaatgaatgaaggtgactagaaatgtgctaaggtgccagctagtctcctgacctagaagctgtggaatcgacataccttttaataataatgcttccagctgggcatggtggctcacgcctataattccaacactttgggatgcgaggtaggcgaatcacttaagctcaggagttcctggccagcctaggcaacgtggcaaaacctcacctctattaaaaatacaaaaatgagccagacgtagtggcacgtgcctataaccccagctaatcaggaggcttaggaaggaagatcgcttcagcctgggaggcaaaagttgcagtgagctgagatcatgccactacactccagcctgggcaacagagtaaaactctgccttaatagtaacatagcccttccaaatttgtactcagttgctggactggtcaatttgtcaatacacttaccgaaaccaatatacattgtttgaaacctgtatgtatctagtttttggttttttttctgagactgagtctcgctttgtcacccaggctggagtgcaatggcgcgatctcagctcactgcaacctccgcgtcccaggatcaagcgattctcctgcatcagcctcccaagtagctgggattacaggtgctcaccaccatgtctggctaatttttgtatttttagtagaaattgagtttcaccatgttggccagcctggtctcgaacccctgacctcaagtgatccgtccatcttgctgggattacagcaattactcccaaattgctgggattacaggcgtgagccaccacgcctggcctgtatctaattttaaactagattaaaattttttatatttactcttttataccacaattcacaaaagatttgtgacaacttacagcaaaatcacataaaatgagataacattaaagtagattagagaatcaagaccaagaaaaaggtaaaaatgtcaatcacatggattaacagcctaccataaacggacttaaaatttgacttaaaatttcctgtcaggcaaagcaaaagaggaaacaccaataactgtatagttctcattattagaaaggaataagtatatcaattcttcaggaaaaacaactcctttttctcagcactgagttctaaaataactttttaaagcatggactctatgcaagagatagtatatgaaaaaagtgaacaataaccttacagatatatagataaatatatatgtgtatatatattttttttcttcccagacagatgctagctctgtcacccaggttgcagtacagtgccgcaatctcagctcactgcaacctctgcctcccgagctcaagcaattcccgtgcctcagcctcttgagtagctgggactacagatgtgtgccaccatgtctggctaatttttatatttttagtagaggtggcatttaaccatgttggccaggctggtctcaaactcctgacctcaactgatccacccgccttggcctcccaaagtgctgggatcataggcgtgagcaattgcacccagcctgaaaatattttttataacacacagcctcttatcacatgctgttaaaagataccccaaaaatagtatcctaaagttatctatatggtgaaacaaaatacatatatatataaaattctaaaaatatttttccaaaacccatatataggaataagttacatattcatagatacatggtgttttaagaagctctataggccagatgcagtggctcatgcctattaaccccagcactttgggaggccgaggctggagaatcacttgagtccagcctgggcaacatagtgagaccccatctctacaaaaaaaataaataaataaaattagttgggcaaggtggcatgctcctgtagttccagctactcacgaggctgaggtaggaggatcacttgaacccaggagttcaaggctgcggtgagctataatcacaccactgcactctggcctgggcaacaaagcaagatcttgtctctaaaaaaaataataaaatttggcggggagcagtggctcatgcctgtaatcacagcactttaggaggccaaggcaggcggattgcctgaggtcaggagttcaagaccagaggccagcctgaccaacatggtgaaaccccctctctactacaagtacaaaaattagctggatgtggtggtgcatgcctgtaatcccagctacttggaaggctgaggcaggagaattgcttgaaccctgaaggcggaggtcacagtgaactgaaactgtgccagtacactccagcctgggcaacagagtgagacaccttctcaaataataataataataacgataatgataataataaaacaaataaagatgaaagtaaaatattttttaaaaagatctataaaactaaattaaaataacaataggtcaggcacggtggctcatgcctataatcccagcactttgggaagccggggcaggcagatcacttgaggccagcagttcaagaccatgctggccaacatggtgaaatcttgtctctactaaaaatccaaaaaaaaaaaaaaaaaaaaaaatagcaggcatggtggtacatgcctataatcctagctactcaggacactgaggcatgagaatcacttgaactcaggaagcagtgagccgaggccgagatggtgccactgcactccaacctgggcaacagagcaagactgtgactcaaaaaaacaaaacacaacaaacaaaaaaccccactaaattagaaaatgatcagttttatttcaaaattatccatgatgggtttctttaaatagagggatacctgctatctaatgcagttgtttagtcaacattctgtacatgacacctctgactaagggtcagagaaacccaaatgcaaaaatgctttacagctgatcatgaacgatccatccagaatgaggaatgaagaactctaaagtcctaaagaaaaactctagataaatgagaaagtgacatacactagaaaagattgttttaaaaagatcaatgatatattaaaatatctataattaaatatatacatatataaacacaaatgtatggatataaagggggaattgtctagattgtaaaatttaatttaggcacatttttggaatatttctacaacaaaaagtataacagtatgctataaagcaaggggatttaaaagctacatttatattttaacactggtagcgagaacaaagctccataaatgtgggattagcaaccccctgccaaacagacagtttttaaagcaccagttcaactttattttcttggtgagacttcctccatttagaggatagaactgacctgcttctgcctggctcaaaagacctaacaggtttatttatagaccactgccttgcttctttaaaagggccccacacttgccgggtgcggtggctcatgcctgtaatccaagcactttgggaggtcgaggtgggaggatggcttaagcccaggagtttgaggctgcagtgagcaatgttcgtgccaccgcactccagcctgggcgacagagggagaccgtgtctctctaaaataaataaataaataaagggtcccacatcaaaagatggtgaatgaccacagtcaagagacaaaatagcaaacctgcctccacactcctgaatggccattctcctacccccactctccacagtttacgtctttcctctcccttgcctaagtcgttccttcaagatccagcatgttatcagacctgtactacaggcctcctcctctggattctggcagtatttctacctgtagaaatactgtaacactcaccaggtatgtgggctcacagctgtcctcgtacaggatttacaattcaccaagctgccccactagcctagaaatcccaacagggaggggtccacagcgcagaccccaccaaatctgaagtgcttactgcagcgcctgggtgttgaagctgatctgaacggtacttcacatggtgctgaaccaattcgtttctttatattcacacagtcagcattcaccaagtggctactacaagtaaggatctgtgctgggcacttagtttttgaagatgaatcagacataaactggaccttcaaggagctgaagtctaacaggacttgcttatgctatcaactataaatcaaagaagaaagtgaaaaatctcttaagaagtttaaagaggcatgaaatgacgtgaatgatgaaactcactgttgatatagtttggacagaaaaaggttgcaaacatgaatataaaaccactaaaattatggtacacacgtatcgtgggatagatagccgttaaaaagcgtaacatgtccaggtgcggtggctcatgcctgtaaccccagcactttgggaggctgaagtgggtgggttgcctgagctcaggaattcaagaccagcctgggcaacaaagtgagactccatcaaaattagctgggcatggtagcatgtgtctgtggtcccagatactggggaggtgaggtaggaggatgggttaagcccaggaggaggagcttgcagtgagccgagatcacaccactgcattccaacctggatgacagagggaaaccttgtctcaaaaaaacaaaacaaaacaagagagtaagatgtaagacagctctatttgttttctggttttgtattgagatggagtctcccctctactgcctaggctggagtgcaatggtgccatctcagctcactgcaacctctgtctcccgggtttaagagatcagcctcccaagtagctgggattacacgtgcacgccaccatgcccagctaaaaattttttttttgaggtggagtcttgctctgttgcccaggccagagtgcagtagcacgatctcggctctgcaacctccacctcccaggttcaagcgattctcctgcctcagcctcctgagtagctgggactacaggtgtgtgtcaccacgccccggctaacttttgtatttttagtagagatggggtttcaccatgttggccaggctggtcttgaactcctggcctcacgtgatctgcccaccttggcctcccaaactgctaggattacaggcatgagccactgcacccaatctaaatttttgtatttttagtagagaaggagtttcaccatgttggccagcctggtctcgaactcctgaccttaatgacccacctgccttagcctcccaaagtgctgggattacaggcgtgaggcaccgtgcccagccaagatagctctatttgtaaaaatatatgtatacaaaagtgacacaacaattaaagctaccatttactgaacccttactatatgccaggcagggaagagggtcagagaggcaagcaatacacagaaaacaggtacagaaagaggccttcactgagaccttcactgagacttgatctcagctaaagaaaggcacttcccccaaatcaccgcaccttcccaggtaacctacatccaactacttggtggggagagagagggggtataaagactcagcccctttgacccaatttgggagtacttggaaaggttagcctaggtccagagctccttgctggactgggtaagccctttgttatagctgcaacacagttcaatttctccctctgccccaatccagcttcctgcatgcaaatatccatcttcacagtctgcttcctggggggaacttgacaagtgagggagaggatgaaccgttttcttttcttttcttttttttttttttttaagagatggggtctcattatgttgcccagtttggcctcaaacttctgggctcaagcgatcttctttcctcagcctcttgagtagctgggactactggtgtgcattactgcaaaccagctatggatgagtcaattttgaataaacttgcgattccaggtgaaaatatagaacaaaaagttagaaatgtgggccaaagttcatgaaaaagatcagggcagtaaagaaattttgcgagggtgcacagagatgacagttgaaacgacaagattttacaatacaccaatggggaaagagaaagaggagggcaaacgtagtatctttagttaatgctgatatactggatgctgcacgagaaagaggaaacccaagaaacaggcagagaggatgagcaaaccgagagaaaacagatacagcatttctggaaatgctgtctgcagccaacaaaggcaaaagctttaaaaaaaaataaaataaaaaaaaaagcaagctaagagctaagaagaaagacacataatgagtgcttaacaaacccttgttaactaactgagtgggatacatgacctgcaggatgctcagcttttacacctaggtaagccaagacacagattagcttctgcttgagcaatctggaagaaatccccttctgaaaggcttctttcaagagcattcccaaggatctcctgaacaaactgccggggtacttgagaaggatcaccatgcttgactaccaaattccaacctcagtcaaaccgatggactttcaaatacatagaacttcctggaggagctggattttattaaaaaaaaaaaaatagaaaaaagatacatagaacatgctataacaggatgtcttagactggacaacagttcaaaggtgaaagaaaaaaagaagttaacaatcataaaaaataagaaaaaatacatagacaaattctaatacatatatatatttttgcttcagaacattttttgggaggtaaacatttttaacaatagcaacatcattactgacttgaaggaaaataaataactcttcttagccttggcaccctaaagaaaataacaaaaaggtgttatttgggccaggcgcggtggctcacgcctgtaatcccagcactttgggaggccaaggcaggcggatcatgaggtcaggggatcgagaccatcctagctaacacggtgaaaccccgtctctactaaaaacacaaaaaattagccgggcgtggtggtgggcgcctgtagtctcagctactcgggaggctgaggcaggagaatggcgtgaacccgggatgtggagcttgcagtgagccgagatcgtgccagggcactccagcctgggagacagagcgagactccatctaattaaaaaaaaaaaaaaaaagggcgttctttgaccttcagtcttggctggaataaacagaaagtagtttaccttctatgcatagacacatagaaggaatatacattctgttactgtgcccaacacggctatgccatattcttcactgactcactgaccttccctgtttccctctgggtgtggctggggatccccacatccacatctctcgctccaactcttcctgcccaacctgccaatcaaaagccaaggctccaagcatcacagactccccaagagccagtttggttatatttcccacagagatctgaaaacctgctggagctccagaagtcagtaccaatttcaaatctgatcagcatctctgaaagtcacagttaccatatagctgaatattttttcataaatttaatgccagcgtgtctgtttggaaactttgaaaatacatgttgtatggtttactgcactggaaaaggtgccaacagagtttcaaaggaagggaagtgtataactgtttcctttcaaatgcattttccaatgggatccattcagcgaaaaggctggaactaactaaaacattattaaaactgttatggaaagagacagggagatggaaaaagatagacccaaaaaagtgaaatacataagcaagagtgagacagacatacgaggaaaaagaaaggggatctgggcagagagacaggttggacagggaaatggggtgagatggagttttgtctggcagttgctgttcgtggttttatattgctgcagatcaatcgatcaggactgcagtgctgctggcccagtggcacaagacaaaccacagagttggctttacgttcggcacttgcgaactgctgaccttcagttttcaaaccaaaaatattctttggtaaacagtaataccaggttcagtccaaccagtcaagagaaaacaaggactactaacctgaagtagcaccctattcagttacatcaggcaccaacccttcataggcatcaaccggggatgtctgcaaacctgaaaccacaccctaccaaactaactccaggttctgactcaaccaactaggcagtgataaccaggaatgctcaaataagtgacatgtttcaaaattggcttaaccgggacctactcaagcgggaaggccagtccacactcacagagccagaaacacagcaatgctttctgaggtcacatgtgcatgactccagtggaatctgcatgcaatgctcagggcagggtttggcgctgcctcacgaagccattacatttctagacaaagaattaacagtttgtagtgagtgggttatctgttatttcttgctgaattcatctaagctagcatgatgctaaaatttatcgcctaaactgggatacttccgagagtgaaggggtgtgctatgagtaattcataaataggatccatccctgggcaaaccaggacttacagtcaccctggcctaaaccataggatcttttttcttctctgggtcagtattataaaactctacctcagaagaatcttttcaagaggcagaactgctctgctgagtgccaaagcactttctttttgagctcctccaatggagaggtaaacaaatcaattaagttaactacaaaaactaacaagaaagattgagctgacaatcaggattctggagaagctcaaaattccaagcagcagcttcagagaagggaaatgtgccacagatggagctgtggaggctgatccacccggcctctcagcgctaggccctgatgccgcagccagcttcaaacaacagaatgcagggcgggcagacgttggtgcgagtttgctgagttccaggccatcattcttgagggtgtaataaccatgggctgtagcacacatgttgagggatgagggaaaaaaataaacagagagacaaaagaatgaggatgcactgccaatttcaattgtgcagcttttatttttaaatgcttatcaagctgagagagagcagagttcttggaaaacaaggtttccttttttccaatgccagggtaaaacaccctcaaggatgggcactgcacagactgtaacaacaaggaacgtggctttgcatcctcccagcaacaaagtctaccacggatcccaccccactctgatttcggctcagccgagaacttgaaataacgggcccactgcctctggtaaaaactgctcttttaaaattttttattaatctccaaactggctgtgttagaattacagcccattacctaccaactctcttcactaataaaataaatttgtaaaagccctaattactacttttactgaactacactgtttggggatcaagtacaggaagctgagagttcaaccatttgtcagccaggggatgatggggagaggaccgggggacctagagtcactagcaggaacataaggcccagagataagtctcagaacccatgcccaaaaagaaacaaaaggtcactaaccctgtttttgttctcaacagctccacgaggatccatgccatcatggcactttgggaggcctgtcacgagttacacaggcctaggctgcccacaccccagctcagcagaaaaagagaactgcaatccaagtcagacagatcctgcctggactctccgcagagagcctggagagtctgaccagcaaagaaacagcaatcttcctacctaccccactctcaatcccccccaccccaatccaggctcccgaagaagaaaaacaaacaacaacagagcaggcaattgcacaagagctgcagagtgaaggcgaggtggacggcaacggcttctcggctgtgccccgtatctcttcccagaacactgatgacaaagctggagacgttactcacatgctgagccagtcagcccctcacccagggctggtgctgagaagtctgactagaaaccggcagtcaacgctgacacactcatttataataaaaggtgtatattaaacaaactagtcaaatccttaaacaaaaagtaagggcaaaatgtgactgtcattcttaattgtccatgcaaaatcctcccggttaaattccatgtgtctcctggactttgataaatgttatttctcctctcaagaacatgaacagagataccgctgtcgaagtagctctcttggaaagaaacctgataagaaaacctgctatggcaggtgagtgaaacctgtgacggacaccattttgggggatgaccagactggaacataatatttcactgaggcagaggggtctgtggttactttctgcatgccacatgtctagccctaaagaactgaggaatgctctcgacaggaaaaacacagcagccaatgctgcgataccaaagccacaactccacggggccctggagcctctcaaactaagctgccagctagggagctaacactagctttggataaaacacagctctggtacagtaattaatttttttcttaactaggattacattaattttcaaggactaatggagtccagctgtaatgtgaagagtggctgctgatgcacaaaggcacttgtgcgtacattataaacacacacacacgcgcgcgcacacacacacacagacctataaaaaggatctactataacaggatatttttagtttctacaatgctgcactaaaaatacagtcccggctgatacatcatggcagaactattctctctctgtcccttcaggaacagtttaaaacatttatttttgtttccttttgcgatggtcagagtagagagagaaaatagcaactcattgataagaggaaacgagacagacatgaaaaattgaaaactacctaaaaactcatggagaggtttattttattagttcttaataaatatcttgcagatttcctcaggaaatacaccagatcacatgtaaaatagtttgatactgatgtcaactgcatcaacatatgaagtctattagggtgaagccgcagcagggtgatcagcgtgctgaaaaactccacagtacttgtgtgtgtggggggggatctcacggccttccaaattcttcgagaggtaaaaaagtcagccaagacgcagagagagaaagagagagaaaaaaagatcccacatcctgctttcagctgccagcaatgtgaagtgcccagagattaattctacgtctggcctggaaatgcgactttaaagcatgagggaggggagtgagggtgggtggggggcggcgaggaggaaagaggaaagagaagggcaggctaaccgaggctggcagcaggccaccaaccccttcccaagccatgtttcaatgcagacagaagtaaacccctatagacagcagcgcctcagcctgccagggccttacaccagctgcagtgcatctcgcgctctccctcagccctgagtgcagatgttccccgcagcatcacttccgctacactttcttttaaagaaacagcgcacacatagaggtatttctgcctcttcccagtaggcagaaatttttggccttcagggatctcgggcaaggtggaaactcagatggcaggtaccacgatggtaaagcagctaccccaatctcccttggaagggaccaaccaaggtatccaaggaatggggtcaagagcattagtgaggtaataggaattttttttacagatttggctttctactgtcttcagagggagagagagaggtccccacagtttggggctaagaaaagggggggaaaaagtaggctgaagatttaaaccgtgatttctcaaagcagtctactgtaacattaccatctcaaagggattctgatgacttcatcatcatggaagtcttacagaattttttaaaaatataattctaaggtattaacattttgcaaggcacaaatacttacctataagacataatttttttaaatcaacaatctgttaatttcttatttgcctaaactctttatacattttcagaccttagaaaatcaatcaatcaatcactgattaggcacctaactttttcaaaatttctggcccttttttgtgagaataagcatctaattttggagttagccttgaacattgttaggaatttgctaaaatattatatagtctcttgtccccatggagacatactctagttgagggatttatgcattttatgaagctaaaataattccattttcaagatgagctaaatattccctaattgatctatgaggttgttagttcttctggaatgcaggaagagttagaagaatcagtaatgtcaaaatgtcaaaaaaaaacaagacaactggtataccctcaaaacctaagttgcttcttttgaaattcaagttcaaaataagaaacagaatcttcctttatgggaaggggagaaacactggcaatcagtggcgaacacattatggcaggaaagtttaattcaacaaacatttattaaatgtattccatccacaaggtactggacgtagaaacaggtttggaaatggttaagtaatttgcataacacagcaagtaaacaatcagaattagaacctagttttatctaatttcaaatatttctttttatcattataatttttaaaaatacatttacacaatacattattactaaagtattgtgataatttcagaaaactacaaaaatacagagaaaaaagaaaatttaaaacatgtttaattctaccatcttagagaatcatgggtaagttttgatggatatccatcagtctattaaaattaatatatgtataatatatattattttaccaaaatgtgatcaattgcaaagttcataaccatgaagccacacggtcttcaggaaaagcagagatcacatttttggcagctgaccactcccaaccaccagaaaacagaagagtcatggtccaactctaaactgggcaggatttttctattccatctttacacttctctctgaactctttaaagcaaagaaatttaaaaatatctcattaccctctaccatcctcctgcacatcacctagagcccaagacagccaagtgcactggctcccctcagccaccttccacagtacttccagagccaaagaataaacaatgaaaaggaccgccgggcacggtggctcacgcctgcaatcctggcactttgggaggccgaggcgggcagataacaaggtcaggagatcgagacgatcctggccaacatggtgaaaccccgtctctactaaaaataaaaaaaatcagccgggtgtggtggcgcacacctgtagtcccagctactcgggagggcgagacaggagaatcgcttgaacccgggatgcagaggttgcagtgagctgagattgtgccaccacactccagcttgggcgacacagcgagactcggtctcaaaaaacaaaaacaaaaacaaaaaaaaaaacaatgaaaaggaccatcagagatgggtaacacctgtatttaaatgtttaaatgtctggctgagtatggcaccctgagcccccacagacagcctactctcttgctgttcagctcaatagaaggtttaatccaagagcttttactccaaaagaatgatgtgcttctcccataacattctgttatggtgcagacaattcattcgttagtaaaaaaataagataaccaaataggccaggcgcggtggctcacacctgtaatcccagcactttgggaggctgaggtgggcagatcacgaggccaggagatcgagaccatcctggctaacacggtgaaatcccgtctctactaaaaatacaaaaaattagccggacacggtggcgggcgcctgtagcccagctactcgaaggctgagacaggagaatggcgtggacccaggggcagagcttgcagtgagcctagatcgcaccactgcactccagcctgagcgacagaccgagactccgtctcaaaaaaaaagataaccaaataaggaaaccacattctttcctccctgtaatggcaaaccaacaagactactcacctacatacccatgccaaccttccaagcttgagctactcatcacctgaggtgctggcatgtcatcacctgaggtgaggtgaaagatttaaccctgacaatgtagtccatgatgactccaaacttactcactcagagtgatgtataaaaataagctagttacccacagaatgcacaacaccgagagtgaaccctaatgtaaactacgaactttgggtgatgatgtgtcaatacaggttcactgactgtaacaaatgtcccactctggtgtgggatattgatagcggagaagtttttatgttgtgggagacaagaggtacatgggaattttatgtatattctgttcaatcttgatgtgaacacaaaactgctttaaaatgtaaagtctattttttaaaaggacaggttttattctgccatttattcaacaaatacatgaaggcctacattgtgccaaagactgtaaaaaatttaaaatgcttaatgcagccaggcacggtggctcatgcctgtaatccccgcactttgggaggcggaggtgggtggatcccctgaggtcaggagtttgagaccagcctggccaacaagacaaagccccatctctgctaaaaatccaaaaattagccacgcgtggtggcgggcacctgtagtcccagctacatcggaggctgaggcaggagaatagcttgaacctgggaggtggaggttgcagtgagccgagatcgcgccaacacactccagcctgggcggcagagcgagactctgcctcaaaaataaaaaacaaaataagataaataaaatgcttaatgtctacaggaaggtggttgctggacattctcaaacactgctaagagtgtaagctgatacaccttcttcaaaaagtaacctaggtcgggtgcagtggctcatgcctgtaatcccagcgcattttgagaggccaaggtgagaggactgcttgagcccaggagtttgaggccagcctgggcaatatagtgaggcttcatctctgcaaaatatttgaaaatcagatgggcgtggtagcacgtgcctgtagtcccatctacctgggaggctgagatgggaggactgcttgagcctaagaagaagcttgaggctgcagtgaatgcaatgaactatgaccacaccactgcactccagcctaggtgacacagaacaagaccctttatcaaaaaaaaaaaaaaaaaagaaaagaaaaagaaaaaagaaaaaataatctagcatcatgtatcaaaagtattaagatgccaaaaccccttcacccaacaaccaaacttctaaaaatatagtatttatttatttatttgagacagggtctggctgtgtttcctaggctggaatgcaatggcatgatctcgtctcactgcaacctccaacccctgggcttaagccattctcccgtataattttcccaagtagctgggactacagacatgtaccaccacatccagctaatttttgtatttttttgtagagatggggttttgccatgttacccaggctggtctcaaactcctgggctcaagtgatctgcctgcatgattacaggcatgagccaccacgcttggcctattctaataaaacaacatgaaacgcagacaaaaattttatgtacagagatgttaattacagctttatttataatactagaaacctgagaagaaaatgttcaaaaagagggtaatgattaaatgaaagttaacatattcatgtgaagccaagctcagcggctcatgcctgtaatcccaagactttgggaggccgaggaaggaggatcacttggacccaggagtttgagactagcttgggcaacacagtgagaccctgtctccacaaaaaataaaaaattagctgagcgtagtggcatgcgcttgtagtcccagctacttgggaggctgagacaggaggatcacttgagcccaagagttcgaggctgcagtgagctatgatcatgccactgtactccagcctgggcaacacagtgaatatacataacaataaaaacattcatatgagaacatgattcagtttatactaggttggtacaaaagtaattgcactttttgccattactattatttgtatgtaaattacaaatgtttacaaagaattttatagctttgtatacttgtaagtaaaaatagtagaatcaaacattgtatagtcagtatcttttcaactgtgtaaaaactccttgaatatttatacatcgtataggaaagaatgtcactgccagaagttggtttctactttaccttttttagtactttcaatgaaacccaaaatgttaaatcctttaaaaaaaatcatttagttttcataaataggacagaattgctccagttaggtgaatgtaaaaatatgatatatgagtagggaaataaaaaagtatttctagtcaggaagaaaggacagagagtaaaagatgaaagattcaagagaccagaaaggactgaacttacgctgttctatagaaatttactttccagagccccaatgatatttactccagggttaagagctgatatggtttggattgtgtctccactcaaatctcatgatgaattgtaatttccagtgctggaggtggggcctggtaggaggtgactgcatcctggggtggtttctgatggtttagcaccatcctcctggtgctatctcctgatggagctctcgggacatctggttgttttaaagtctgtagcccctcccccttcactctcttcctcctgctccagccatggaagacgtgcctccttcctctttgccttccaccatgattgtgattctcctgaggcctccctagccatgtttcctgtacagcctgtggaactatgagccaattaaacttcttttctttataaattacccagcctcaggtatgtctttatggcagtatgagaaaggattaatacaacagtagataccaaagcacatttaatggattttactttaatgccagatgtaaaatatgcatttggaaattatgctttcaagaaagtcaccttaacaaaaaacaaggaaagacagtaagattatgagcagtaacctagttaacagatgcccctgcccttgccattcaatcttcattgtccaggctgacctgctgacagattattcttttttttgagacggagtcttgcaatgttgcccaggctggagtgcaatggggtgatctcggctcactgcaagctccacctcccgggttaacgccagtctcctgcctcagcctcccaagtagctgggattactaccatgcctggctaatttttgtattttttagtaaagacagggtttcgccatgttggccaggctggtcttgaattcctgagctcaagtgatccacctgcactggcctcccaaagagctgggattacagacgtcggccacggcacctggcctcaaattattctttgacttgaacttgatataacgcatgtttactgagaagttacaacaggtcagggactgttttagatgttcacaatgtatcagtggataaaacagaccagagacccctataagcagggagcttacattcttgcagaatagtagaggaaaataaataataaacatatacacattaattatctagtatttagaaaataaatcaatagaattggaagataaagagtgcaggtttggagtagaatgcagcagtgttaaataggatggttggggcaggtctcacagaagtaacattaagcaaagacttataggaggcgaggtattcaccagacagatggctggatgcagaacattccaaacagagaaaacagctaatgcgaagggccaaaggtgggagagtccccagcttagcagagaacttgcaagaagggtagtgtggctgaagcagagtaaccaagccatggggagaacagtcgtgaatgagctcagagagaggcaatgcgggggcggggggggggggggggggcaggagaagaggtccatatatgaaggccttgtaaataatgtggcttttacactgagtgaaatgggaagtcagtgaaggattttgaacacagcagactctgtatgtaatgtgtctgtgtgtgcatgtttgggaaggaacgagagaggtaaggggtacaaaaagagaccacttaggagtttcaagactttctttccaagtttaaaaagaagttttatccacaaggggtattcaggccatgtttgcaaacacaggttttctcttccaatgaggaatattgaagaatgtgtcaatggcctacaactgtatccctagcaggcatctgaaaaataatacttacgaaacattttcctctgctcattgccctgacatgagttctgggcatcaccctctctcaggggagaggtgaaaagaggttatgtggaacagacagtgataacaggatgacgtcacaggtgtgcctcaaagaagtccctggtgagctgggctcataactactctgcagtgatttattcgaccctgccagctccagctggagaagagatgcagaaagctgacacagcctaaagccctgggcaggcattataagatctttctccctgcagtcccctgccagctcctcccctctttcaaccactgatccttgcctcagaagccaaagtgtgaacagcacgtgtccggatttcagaaacctgcccagcagttggaaattccctgcagcgtgtcaactgctacatctgctgttggcacttggggcaaagggatcacacgcgcatattttctgaacataagcttcaagatatgagtcttatatttgaagaggggactaaacaagccagaacactccaattacagtaaatgcattcctaaatagacgacaatctgccttctgaaaaggaaactgagacatacaagcaaaccgaatagcactaagaacagcagtagtcaagaacaaaagcacagagaaccctgactaatggaaaggatttcatgggccagcaaggttcaccagatatataatgtgatgtagctgaaacaacagagtactcttttccaaatctctaactcacatctttttgtcaataaatggctcctatcacttcagctgcagcctttcctctccactcctttgatctttcttccccacccaattagccctctaagtgatattctatacactggacacctcttggaaaaatgaaaaaatgtgagcccaatgacaccatttgccataagactgagctgtaaatgggcaggagctggaaaagaaactaatctttggaagagcaaactacatgcccttgccaccctggatgtaggtgcccagtcacactgctcatgggcatcacaggcagagcaaaaaaaaagaaaagaaaagaaagaaagtctgagtaagtctgatggaacaaggaaatcccagcttcctctggtagtacggcagactagacacctagatccattctcccaatcaaacagctcattattctgaaaaaaagagtatgttaaacatctttttgaaaagcattcgtgagctagtaaaataaaagaaaatcctttggtcagagattgaataaagatgggaaaccagataggtaagtgtggcattacaaacagcctttaccctaagaacatttgctacctgatgaactcgagctttgctttccaaggctgcatggacacagccaagatccttatcataaagctagggtcccacaaggctacaccccaaatacaccatttcagattatggagtctctaaaatgccatgttgaatatattttagagaaataaaagacaagctcacaagtatatttgggaaataagaaaccataaagaaagtcaaagcagatttgatttaaaaaatatatggaaataaaaaatttattaaaattaaaaacattgtcaatggggcatatttaatagaaggttagatatagctatggaaaggttcaatgaactgaaagatagttaaggaaattatctggaatgtagcacaaaaagaagggagtcagaaaaatcaaagaaaggtttaagagacatcaaaaactaagcctgatgtatgtcttatcagggtcacagaaggagaagagaaagcatggggagatgcagtctttgaaaaaagacactaagagttttccaaaactgataggaaaaccaaccaaccaaccaaccaaccaaccaaccaacctcataggttacatgaagcccgacaaatacttcgcaggaataatttttaaaaatccaaacctagaccaatcaccaaaactgtggaacatcaaagattttaaaaagacctggaaagcacctagagagaaaagacaggctgctttcaaaagagaaacaaaacagatagctgactttaatcaacaacagtgaaagcccaaagatgtagtaacctatcttcaatgggctgagcaaaagtaactgttaggctagaattctattactggaataagggtaaaataaagcattttcagacaaataaaaaaatgaagaatatttgccttcaaaagaacttcactaaatacattctaaatataaatagtatacttcaggcagaaagaaaatgatcccagatagagggtctgaaatgcaaaagtgaatttaacagtaaatatacaggtgagttaaggccaggcgcagtggctcacacctgtaatcccagcactttgggaggctgaggtggggagatcacttgaggtcaggagttcgagaccaacctggccaacaaggtgaactccatctttactaaaaatacaaaaaaaagaaaaaaagaaaaaaaaaaaaagaaaaagctgggtgtggtcatgcccttgtaatcccagctactcaggaggctgaggtacaaaaactgcttgaacctgtgaggcagaggttgcaatgagccaacactgcaccactgcactccagcctgggtgacagagtgagcctctgcctcaaaaaatataggtgcgtttgaacaaatatttactgtcaaaataataattaaaaaaccaaataaatcaaaccaaaaataacgataacttgttttatagggtttaaaaggaaaaaagaatatacatgacaacgatggcatgcaaattgggaaaataaatttaataaataaaattttaagtttttctgtggttcttatattgtttaagaggagaatggaaatctgattaacttttgattttggcaaggtgaagtatgcatgctttaattcctagggtaaccctaaaagaaaagaagactagtgctgggggtaaggagtaggggcacgacgacaacggtggaatggaaacaataatccatccaaaagaagacagaagaaaaagagaaacagaagagacaggagaatgagaaagcacccggagaaaatttctgcaaaatataaatcggataagggcttatgtccaggttatagagagaactcttaagacgtaataataaagacaaacaacttgataaaaaaacaagtgggcactttgggaggctgaggcaggcggatcgcctgaggtcgggagttcaagaccagcctgaccaacatggagaaaccctgtttctactaaaaatacaaaattagctgggtgtggtggcgcatgcctgtaatcccagctactagggaggctgaggcagaagaattgcttgaactagagagacagaggttgcagtgagccaagatcatgccattgcactccagcctaggaaacaagagtgaaactccgtctcaaaaaaaaaagaaaaaagaaaaaaaagagccgggcgtagtggctcctgtaatcccaggactctgggaggccaaagtgggtggatcacgaggtcagaagtttgagaccagtctggccaacacagtgaaaccccgtcttactaaatatacaaaaaattagccgggtgtggtggtgtgtgcctgtaatcccagctacttgggagactgaggcaggagaattgcatgaacccgggaggtggaggttgcagtgagccaagatcacgccattgcactccagcccaggcgacagtacgagactctgtcttaaaacaaacaaacaaacaaacaaaaaaaaaacaaacaagtggggctgggctcacacctgtaatcccagcactttgggaggccaaggcgggtggatcacctgaggtcaggagtttgagaccagccttgccaacatggtgaaaccccgtatctactaaaaatacaaaaattagccaggcgtggtggtgagtacctatagtcccagctactctcgggaggctgaggcacgagaattgtttaaatccaggaggcggagggtgcagtgcagtgagccgagatcacgccaatgcactccagccctgtgacggcagagtgagactccacctcaaaaaggaaaaaaagcaagtgggcaagagatgtaaacacttaccaaagaagatatacaagtggcaaataaacacatgaaaagtctctcatccttagttattagagaaacacaaaccaaaatgaaatagcaccacacatttactagaatagctaaaataaaaagaaatgacaataccaaatgctgacaaggatataaagaaagtggaattctcactgctggagggaatataaaatggtccaaccaccacagaaaacagtttagcagtttcttacagagttaaagatacacatgccatatgatccggcaagtccattcctaggtacttacgtaagagaaatgaaaacacgtccacaaaatacttgcatataaatgttcatggcagctttattcatactagtgaaaaactagaaacaacccaaatgtttatcaacaggtaactggataaacaaaactacacaatatccagactcctcagtaatgcaaggaaatgaaatactgatacatgtaacaacatgaataaatctaaaaattactatgctgagctaaagaagtcagacattagtcagacacaaagagtgcacactcttaggattccatttacatgaaactctagaaaagacaaatctaacatacggtgacagaaagcagataagcagtcgcctagggcaaggggtgggatggagatcaactgggatgggcacaaagagaacttctggggatgatggaaacgctctctatcttgattgtgatggttagtaacttgggcatgtaaatttgtcaaactgactgaagtgcatgcttaaaatgggtgtgttttattgtatgtaaactttacttcaacaaaattcattttaaaatataggatgatgcatataactctcaaggtaccaataactgcagtaaccatcaatagactcaatgcttataatagtcccaaagagaaaacaaccgaaatgcccatcaatggaaaaatggataaactaatgtgactaaaatgtaagattactgcaatgaaaataaatcaactacagctacacatatgaacatggacagaactcgcaaacatatggaataaaataaaccagggagaaaagaatataaatagtatgattagcacgataccatctctatgcaagcaaagcaaaattatgtgttttgttttattttgactttttttgagacaaactctcgctctgtcacccaggctggagtgcagtggtgtgatcttggctcactataacctccacctcctgggttcaagcaattcttgtgcctcagcctcttgagtagctgggattacaggcatatgccactgcgcccagctaactttttttttttgagacggagcctcactctgtttgttgcccaggctggagtacagtggcacaatcttggctcactgcaacctccactccccaggttcaagcgattctcctgcctcagcctcctcagtagctgggattacaggcgcctgccaccgtgcagggctaatttttgtatttttagtagagatggggtttcaccatcttggccaggctggtctagaactcctgacctcatgatccacccgcctcagcctcccaaagtgctgggactacaggcgtgagccatcgcgcccggcctaatttttgcatttttaatggaggcaaggtttccccacgttgaccaggctggtcttgaactcctggcctcaagtgatctgcccgcctcggcctcccaaagtgctgggattacaggcgcaagccaccgtgcctggccccaaattatattttacatatatatacatatacacacacatacatatatacatactaggtgataacactacaaagaaaagcaaggaaatgaattcgcaggtcaggatgatagttacctgttggtgaggtaactacagctatacagagaggaagtacataggaacatctgagggactgacaatattctatttcttaacctgggtggtagttacatgtgtgtttactttatccttctttcagatgttttatactctcacactcctttctgtatcaatgacatatctaccttccccccaggccacaaaaagtagcacagtctctcctaagaaaagcatgtgagaggcctcttttctaaaagaagagggatattagacatgatggtgaaaatatgaaacaatgctccttaaaaaaatccgcccaccccctttttaagagacactatgtatcctaagccaagagaaagagtaaacacttctaccaactagtcatggactgcgctttccatgtgagagggaggtttcctctacccatgacaataatgaacatgaactccagacagccctgagttgcccaaacaacaaccttctgctagcttatttgttgtagccccacctgagtgtcacgccactcagagaattctgacttaccccaactctcttacctttactcctgttcctcttcctatctcagatcagattcacaggtcactttcttcatcagagaacaacagtgctcagatttggggggacattccttgcactgtctagctgcccagagaagctttttcttttttctgatatcaaaggatggacacttgacacctgtgtataatttactagctgtgcagccctgcttaacctttctgatatgattttcctcatctatgaaacaggacacaaaatatctgtccagcctgtctcacagggctgacaagagaatcaaaggaaaacacatatgcagtaactataaagtgtcatcatgtattagagcatggagtcattgctgtggttgtcattactggtcacgccctctgaaaactacaattcttcctcatataggcatttacttggttagggtccaaagttcaacacttcccacccctcaccagccccctagaacatacctactttctctgtgaattcagcatacagtatgaatctggcctgagccccacacccacacccaagctatacatttacaaaacttagagctctgaaaaggtagctgaaagtcctgctgccaggccaagcgcagtggctcatgcctgtaatcccagcactttgggaggctgaggtgggcggatcacttgaggtcaggagtttgagaccagcctggccaatgtggtgaaaccctgtctctactaaaaatataaaaattagccgggtgtggtggcctgtgcctgtaatcccagctactcgggaggctgaggcatgggaatcgcttgaacccaggaggcagaggttgcagtgagctgagatcgtgccactgcactccagcctgggccacagagcaagactccgtctccaaaaaaaaaaaaaaaaaaaaaaaaaaaaaaaaaaaggaaaagaaaggaaaagaaaagtgtcctgctgccaaaattcctccaaataatgtttctccttcagaataagtccatgtcggggcaaaaaaaaaaaaaaaaaaaaaaaaaaaaaaagggaaaaccacaaacaatcaaattgacaagctataaaacggcaaaagaaacgaaatctgggcaacatgggatattgcatctctcactccacaccaaagcagccatggacaccaaaccacatggctatcttggggcaaaacaaagaccatttcttcaactgatatgataaaaggcttaattttactgagatgacaattttctcatttctttggcttttcctatttctccttccccagcctaaatacattctgaaaacaaggaccctggaacccagaagtggaaagacaggtgggtcccttgacatactcacttctcttcagggaactacaggcagatccacaggcagagagtgccgagagcagtctgcactaagcggcctgtcaagagttctatctcccccacagggaaagagggcagagctgaagcatgcatccttctctggcctgccttccaaagcctaacctattctgacctttgaatctacttctactttgaatctacttctcacaaaattccttgctcaggctggctctgttcattttctctaaactgaggcatcctgaaaatgaaagtcaggtggcaatgattccctacggaaatctacccacagagatccttgtagagaaaaagcccaagggtttctaccaccagagatgtaggaggaggaatgagggggccagtttacacagctaactcaagcctaaccccttatgaaaggtggatttcctgtacaactgttctgacaagcggaggattaggcacttcatacattctgcttgggtaagagactcacgacagaagtgaatcaccacagaggagcatactgcttttctgaacgtctctgagattgttgtatgctggaagacaaggacacttcggttgcgaaccaaactcaactagagtcacctcccatcacaacaatggcatgaaacatcccacacctacaagttaaagctatcagtcctatacagacagctgtagctagctagctagctctctctccctctggagacccacatgtgacactccctctaccttctgtaattcaggattactaacaccattcaaagcaagcataaggctgggtgcagtggctcatgcctgtaatcccagtaatttgggaggccgaggcggacggatcacgaagtcaggagttcgagaccagcctggccaacatggtgaaacccccgtctctactaaaaatacaaaacttagccaggcgtggtggtgggcgcctgtgaccccagctactcaggaggctgaggcaggagaactgcttgaacccgggaggcagaggttgcagtgagccgagatcgcaccactgcactccagcctgggcgacagagcaagattctgtccctccctccccccacccaaaaaaagcaagcataaatgataatgaaaggaatgccagtcaggctctaccttaatcccagctcccaaatattccctaaaagcaggcaataccaatagcacgtgcaagaagtgtctcttgggtgccctcttgctgccaccggggcttctctgcaaagctaaatggatgtatgtgctatgaaactggtagaggaaaacagagggagccagggcacagaaaagggaagttattccagtggtggccaatgagtaacatccagtgatttataggcggtataatccaataatacagtaaaataaaacagtgtgtgcctgaagtggttttgattccaggaattataaaacatttttgaaaaagagagaacaagagggggagagaaaatgaaggaagaaaaaaaaaagggccagattggaacaaattgggcacagatgggggatgcaatggggtttcagtgctcccctaccacaatgctgcttcaattcttcccttcaagaaactagagttttatttccttaaattacaaaatttttaaaaattaaaattcttggagtacttgtggtttagatcaataggtcaccctccggcaccacgtcaaccaatgagatgactaccgaagtgttaaatacggaggcacgtggagaaagcccttcctcgcttcaggctcaggaatgccttagagagattatcagttatgacatcactctgggaaccacctatctcaccaccagctttggacctggtccacgtaagaaacactgctcggtgagagctggctttcccagaactgttgccttcttcacccatgcactcagcaaatgcttactgaatgcctaatacataccaggccctatgccaaggccctcaaacgtcccttgtcccacccctcaaatttatctatccccaactacctgagtgtgcagtatgaggattctagaattctgtatccactgacgtaggactctgcatagggcccaaccgagaggagatcaaggtctctccaccaacacccgtgaacccgtgagttttaagaccactgctgaaactggaaagtttagttggttaaataatgtggcattactcaacttatttcgccctgtaggaaggggggcaaatctggcctcacatcctctgcctccaagagcagagtgggctcctaggaaaaccataacctagggaaaggcaaagatgccattctctcaccaccatctaaacttttcctttcattttgccttctgcagtgtccaaagcttttctacacacttgaaaagtaatcacagtaaaacgttagcaacaatatgatttccatcctggattactgatattgcagaaagaagatagttatacaagggtggcactgaacacacaagaaacaaatgattcacggtagcattagaggcaccagcaaaggacacacttttagagaaaggaatctgctcccctgtggctctccaaatcacactccttaggcaccacatctacagggaagacccaggtagagactgtgaggatctcaatggcctggtgggccacaagatcacttctgcttccggctggaatgctccttctccacagagtccggaaactgacatatgcagccacccacccagaaggacatgtccaagaaggaatggaaagaaaaatgatggcccagatgttctgtagcttgcagtgactgccaattcaccacagaccccagtacctgggagggcaaggcagcatcaggctcttgcttcctggtttcaggcagccagggccctgatggtgggtggcaactctgacagaatgcagactggccaggggagaaacctttagaagggcactggctgacgggacttgggggttgaacacacagcgctgatttatcacttccttactcataaaaatgtgattcgaactgctgctgattagtgaaggatttcaatctttaccctctccccaacccccctccttctccacccccggcacagatgctgctactcagccacaacacccccttattgccactgtccaggcaagcacagcacagcacaggggaccaaagatgatgactcatgtgctgggaaatggaaaagtgcatcttcccaccagccagccctgccgagcactctgctcgcccctgtcccaatggcagcccacacagcggggtctggatggccacctcagctgcacactgggtacttggcagcacgtccacagagctctctgtcctcactgagtgttatatcctgtggcctgggccgtttttccttgaaacacccttggagcctctgaacacctcaacccatactcttcttggccccagtgacctcatcgaggtgacaatgaggtgagagtcaggagcagaccagtcatgaaaagtagggtctcaagtacgggctttatttttccatgtctctcctggctagagggtactcgttatgacccaccatggaagagtcctagaaaaagtgccttggcctcacatcagggaacaaccgatttctttctctgtactcaccatcttaccttccttttacctgtattttcttttttttttacttttaattcttaattattattattattttttgagatggagtctcactctgctgcccaggctgcagtatagtttgcaatctcggctcactgcaacctccacctcccaggttcaagcaattctcctgcctcagcctcctgtgaagctgggattacaggtgcccaccaccaagcgcagctaatttttggtatttttagtatagacagggtttcgccatgttggccaggctggtctcaatctcctgacctcaggtgatctgcctgccttggcctcccaaagcgctgggattacaggcgtgagccaccgcacccggcctaccattattttcttaacctttacttaacaacagctacaagaaaaagactcactggtggcctattaaaaggccaaggtattcctttccatggaatagaagctgctgaaaacagatgcttcatgggcaagggcttttaattcttaattattattattattatttgagatggagtctcactctgctgcccaggctgcagtatagtttgcaatctcggctcactgcaacctccacctcccaggttcaagcaattctcctgcctcagcctcctgagaagctgggattacaggtgcccaccaccaagcacagctaatttttggtatttaaaggcaggtcctttacattcacacctaaagaagccacaggtcatttggtgctggaacaatgtcttggctgaggctgcagctctgtgacaggtagctcactgaactctgtgggttgtttttagtgggagatgggaatgaacaggagggcacctcaggagggcccatttccagagtcaggtgggcttcctacttggtagcagactgtccctcccctttgggcctcaccagcacagcattttacaaactttgttctcttctccctggaaaccagtgctgccacttaagaatcgatgcttcctcagggccatttacccaaatagccatctcaggaaaaattagccaagttcaaaaaggcatctaagcccctggatctcactttctgctgggaattctaaacgctgtagcaggcagcatgagaggaggaaatcctctaggattcagaagtaactgagaacccagacacactctgagaggaccttgcctagtcccagaaagatccgcatttccatttcaaggcaaagtgtggcatattcactcccccaccacaaccaagtgaagcataacccttaagtacaaacggggagataaatcaatcaacttcatggtgagagaaagtgctatgaaaaggggcaacaagagacccagcgccactctgtcaagaaacaccagatctgttttacagcagggtctctatgggccaattcccacttcctggcatttcttgccctgagaccaaacactctctgtcagtgttctgaaatgactcctaggcagcatggaccaaattacccttgcgaacagacacagaaaataatgtcatccctgtactacataattccatcaagtcataccatatcatccttacctaagtgaaatgaagggaacggaagggaagggaaggaatcctggtaacatcctttgaccctgacctggtcatcagaacatttaaaaccctgccaatctgtccttctcccctctacttccacacccacccgaccccctatgaaaaaaccccaaaatgttcagaaaaacattttagaatgcacactggtataatagctaaattctgggactggtggtttttgtgcttccagatttgagtcaccaaagctcatcaattctcggttcttactccctggcaggctcccactagggatatcccatagggaactagacttttccatattgaacaaacagggtacatgagtccagaaacagctattcccaatccctgccaagcgtatggtctctgcaatgaaacatctcagcaatgcctctcccttgggagaggctctgggtctgcagccttcaagaggccttgctgctgcctttcgcgtggccagatgtgcaactgcatctctgcatttgcaaattaagctctatacccatgattccctccttccatcccacccaagcactagagagtcatacagatttcaaagtaaactaaatatctgagacaatggtaggaagcgtagggtagggtgtgtgtgttcgggggtggggtggggggaggtaggtatggtaggtatggtaacacaagaaagaagctacattaatctctatctgtctatattctagatgaagaaactaaacatgccttacctttcagctgggagttgtgtactgcaaacatattgatggtcataagctgcagcatgcgggtacttccaatgggagaggggctgtgctgcagtaacacctggaactccttgaggaccttctcagccactgcagggaatgtctccatcctgcagattcagaaaacccatcaatgaggcacctctctctttcagtctctctctcactctgtctcacacacacacacacacacacacacacacacacacacacacacacacacaccagacaactactgcctaggacatttctttgctactttcacaaaccttcccggtatcctgcaattttgaacaaattcaagataaaggagttttcagggtccagagatgcaaacaactcaagttttggataaatcactatgagttattatgctttggtatgctatttcctcacccctggcaataactgtgttcaagctaatatcaaagtttctctctgaaaccatcggcttttctaaatactcaacaaatttcctgaaaccttcacagtccctaaactctctggtatgaaacttaattcaattaaaaaagtaatgtgaatctaaacaaaaaaaaaaaaatttttttttttttttgagacaaagtttcgcttttttcgcccaatctcggctcactgcaacctctgcctcccaggttcaagcaattctcctgcctcagcctcctgagtagctgggactacaggcatgtgccaccatgcccggctaatgtttgtatttttagtagagacgggatttcaccatgttggccaggctggtgtcaaactcctgacctcaagtgatccacctgcctcggcctcccaaagtgctgggattacaggcatgagccactgcactcggcctaaagatattttacccaagcgtttactttaggtaaccagacatagttctgctattgtcttctgaggtactatcacactgactgttccgcctaacgatcccaaatttccccttgaagaatgcctagacctagaagcccccagtcatctgtctcagttcttcgtgtgttgccgtcctcctccctctcacaaggctctgctcatcggggtctgtatgttttcaggccagtggaaatagaatgccctggccaagtgccactcccaatacaggaagaggctgtaacgcagggaggcagaaatctagccagtgacctagggctcctaaggagaggtcattcaaatcactccttgccaaatgtggccactggatcccaaacagtggtgcatgcctggagcttctttggcaacagaaacaaaccacagctgaagtcttcagaaataaaaagcaagttcaagcttggtgctagagagagtagccaggcacatgggccttagggttatgccaaacaattcgtggtcaccaaagtattttttaccatgtcccccagcccccaaataaacaaactgcttgtgacatacttgtggggttggggaaacagctccaggttggattaacaaatagcttctgaaaagccacaaggaaggtaatccttctcaaaagatagaaagcagtttcaagttctagaggaaggtgcttctagcttcacccatctcggcccttcccgactgggaagtgtcctccctggattagaaaactccaggttttctagaatcttggcaatcttcactccttgcacttggatggcaactcttattactgaccccctggtgcccagaagtcgtgccacagttatgggtcaattacagtttacattccagttccctcctctgctgagctgtcctcattttcattggcacaaaagatgccatgcatttgctttttttctccacatgccatttcaagtacccacccctccaaaacaaaacaaaactcttttttttttctctaaaaaatttcagagccgttaaaactcttggaagatgtggaatggcagagagtgacatgtttggggctggactagatccgtttttccccacgggctctaacaaaggtttcattttaaaccctgacactgtgcagcactctttctggtcagaggtggggagggggctagcacttctcgttacgagaatagcagcgttcactctgcttgaaaagcagccacgctgggcaagtttcagagccatgtgtctccgtgttgaaaggcagtagagagccagcacagaacgacaggacagaagtgtcacgtgggacagttttgcttcgaagctgtgtctgaggaagcctcttccctggagtaggaattggaaacagatccattaacactctctgggtcagactgaagtcttgaacgagcaccaggtcaaatgtccacatttcctttttataaaaagttttttaaaaaaaattctccctttgccttccaactaattcaacatgattaaaacaaaagaaaaaactgaaagcagaaggatataagttagagtaacttcaaatgtgagatgtgagagaaggtggatctattcatgcaaaaccagccttgttcagcagtaaccacgggaggcacagataaagagaggaaccctcctcagggctcagtaggtggtttctggtttccagttttgtaaccaaaatgctatctaattctggcctcaaactacctgtaagtagttttatgtctttctctctgagaaataatctttgcttcaccccgcattactgatggacacgtacgtaagtatgtaggtagatgagtgaaaggtctggaagaatacacgccctgatgtctactactatctttttggagggcacagagttaaaagaaattttactcttagttttaatgttatacttttataaggatttctggataatacttatgtaataattataaaattatagccaagaagaaacagcagtctcagcaataaagcaggaagagaagcaacagagaaaacatacaaaaagtggtcatttataatcgccaaaaattggaagcaatctaaagtgcccaacaatagatgattaagatggaacatgcacacaattgaatactagtttttttaagttgtattacattttttaatcatgtgagagaaacttccaaacatattaaatgaaaatagttgtaaagcaatagaaaaaaagtgtgtatgtgatatgtaggaaaaaaattgaaaaaattttaccaaattttaacggtggagttatctctaggtggtaggaatatgggtaattttttatttgttcttctttgctgagttttctaaatactttacaaagagcactgtaaagaaagaaaagatttctcccataatgaatacatcttacttttgtatttaagaacatctgttaatttaaaaagcaaatcagacacaaacattatatttttaaaaattaaaagtacaaaataaatatatcagtctttgaattccaagagacttcgaagctatgcaaatagcatgactaggcaagcaagtaaaagctaaagtggtaactgtgatcaaggcaataagaggaagcaaaagcatactatttgtcacaaattcagagcctataggctgccagcttcctaacctctctcagtggagtccaagtgcaggtgtgatctgcctctcaccaggaaagggtctgtcaggagccatatggcaccccgactgagtacttctcccgaatccgagatgactctgtccctatcctttaaaacctcagaagataccatcgttttcgggctgtgtgtgtcactgactaaagtggctgccttgtgatgtgatctctagagacaccttgtttcatttgaatggcagtttcaagaaaccaatctttcagacaacaccgggacctaggcccaggactgactcagacggtgactaaccgagcaggactcagccctcagatgctgaggaacacagctgggctagacaacattctctgcagaaaacaatccaggttagtttttctcaacctcttatttttaaaaaacgagcaagatacgaataacccaggagcaaaagaccaaaaccaaaaaactaagccatgtgacagggtggaaatgagaaaaaaaaaaacaaatcatagtactacagaacataaggactggaatggacctcagagaccatatctttaaaccactgatcaggttagttgaagcccgcagcagctctgacttgtttactctcaagatcttgtaactagtaagtggtgaaaaacaaactctttttggcactgaatatttcctctaaagctctgaacctctcgtcagctagtgctgggagttaagagacttatcttgcacatagtaggcattcgagtctctgctgacgcagtgtggagcaccaggcacagagcagaccatgcctggaagcgcagcgtccgagcttttccgaaagggcaggcgggagagtgatgtgccttcagctgctccccattacaatctcctcactcttaattcgttttcaacaccgcccacatttcacatcttcttcgtaattaggcaacagtctacgatgttgtgtgtggcttgggctcattgctttcctagtcttacagacttctatacctttttccctgcaacagaaatgttatttctgtttctgccttccagaataaatatggcgctcaattttattttacctccaggacagaataagaggatacccatagagggagtgtagtgcctagaatccacatacattttcctcaatgaaaactaccgtaagtcatttcttaggaaggtgaaattgggctggctttacctttttgacaacagaatatgttatatgcaggaataaaagagatcctgaaaaataacctggaacacagtaaaccacctcagacaaatgagatatctattcatttttaaaggcctccaaaaaagaaaactctcaaacatcctcccttctgtgaaattttcttacacctaacccaaatctctccagctacaacagaagccaatttctcttactgtcatcccataaaaatcaagactatcctattaggacccttttatatttaaacatgttaggcaccctacagctgtctctaaataagtatttttttaccttaatgtttttcaaaattaatttttcctttcagatctcattttctggcttttaaaaaaattatctattatactcattaaaaagagagatggggtcttctgcctatgttgcccaggctggtcttgaactcctgggctcaggcgattctcccaccttggcctctcaaaatgctaggattataggcgtgagccaccgcacccggtcattatctcgctttttcatcattactgtggtcctttcccaaacttattccaaaatatgtgtcaaaatataagaattttagaagtggaggggaaatcagggtgtttagctactgcataacctgataaaaatatatcctaaatgttcctacattctgcaccaagatttataacttttttattcccaaaagtctctaacagggcaagaaatatctagagtagtggttttcagtgaggggcaactttgtctcccagggaacacgtggcaatgtctggagacattctgagtcagcacatttggtgcacagtgggaagaaggcagggatgctgccaagtatcctacaacgcacaggacagcccctcacagcagagtcatctggctcaaaatgtcgacagcaccaagggttgggaaatcctgacttagggcaacatggtacgggaaaatttaaagaacaaacataggcaaaggaaaaaaggagagaaaacactgagtgaaaagtagtaaaggagagaaaggtgaaaaaacgagaataaaagataaataggccgggcgcggtggctcacacctgtaatcccagcactttgggaggctgaggcgggtggaccacgaggtcaggagatcgagaccatcctggctaacgtagtaaaaccccatctctactgaagatacaaaaaaaaaaaaaaaaaaaaaaaattagtcgggcatggtggcaggcacctgtagtcccagctactcgggaggctgaggcagaagaatggcatgaacccgggaggcggagcttgcagtgagcggagatcgcgccactgcactccagcctgggcgacagagcgagacttcgtctcaaaaaaaaaagataaataagccatctgtggtggtgtgagcatgcagtcccagtgacacgggaggctgagccacgagttcaaggctatagtgcggtatgatcacacctgtgaatagccactgcacttcagcctgggtaacacagacaggctccatctctttaaaaaaaaaaaaaaaaaaaaaaaaaaaagaataagaaagaagcaggagtaccatcaactgtcactttaagtgtagcacaatggtatttcctactcggatgtgttatttttaagatgataccgatatcatcttatccaccttcaaccttgtaactacagccttacattactcactagtgattgtcttgggtctacagtaacctactagaatactacatatttctctgcagtgcttagcaatccatccgtctttttataattcattcatttgtacaacaaatactacatgccaggctctaggaacacaacagtgaggcaaaaactgccagagtggaacttaaactggtggcagtggcagtggcaggacgggggaggtgggaggcaggagatgggaccagtgatgcatctagtttactttgcctaagtgaatgtctccacctgttatgtctacagatagagattcatctactggtaccttgtccaattttcccaagtcattttgaaatccaaactatgcttgcaatgaccatcactatcattcttacccaggttgataccaaatgaatatgtaataagcacactttctagtccaccgcccgtggagcagagtttcttccagtggaaccaagcctttccgcttctcaaaaaagttaactacaacggtatgtggaaactgacatagcccctacctccactaagagagccttctaggccgggcgtggtggttcacggctgtaatcccagcactttgggagggcgaggcaggtggatcacatgaggtcaggagttcaagaccagcctggccaatatggtgaaaccccatctctgctaaaaatgcaaaaattagccagacgcggtggcatgtgcctgtaatcccagctacttggggggctgaggcagaagaatcacttgaactcagagggcagaggttgcagagagtcgagtcatgccgctgcactccagcctgggcaagagagcaaggctctgtctcaaaaaaaagccttctagagaattacagataaacttacgaagttatgacgggaagtgaaagggaaacattgacaataactggggtattcataattcaaaacaaatcaccccaaagggtagctcacaatacaacttccaactcagaaaatattagaatccagtagaaaactggtctagtggaagactggtctgggggcactgccacctactactttcttcactctcctatactcagggagatcctatactaaagaggcaccaggcatccatctgctctggcgtgtaggcattacgttgggcttaggatcactagttttatgcagagaggaagaactcggatccatccaaggaataaaggaatactcaaaactcgatctgtttccaggaatttaagcagtcaagtgttagttttgcacacactaccttccctgagatgtctatggaaatccatggtggatgatgaaaccgtaagaggcttggtatctaatgagatcagcaatatggcaaaggaatctgagcataggaggaaaggatatgggtcaaaaggatatagaaagaaaatgttactcttatttttgatggaaaagtagtggacagtattcttcccaaggaggaccccctgacagctgcacccagggatttagcacaactgccctgaggcactcactagggacctaagccggaaggcagaggaaagagaaacccagagggactggggtgggggctgggacaagattgtatttaaaggagtgttttagtaaaggtagagaaagaagaaacaagagagatagagagtaatatttaccaaatttcatgagcacagtaggacagaagatgaagggaagagaagagaaggtggaggcctctaagaattcacaccctgtgccctcagttacaaacacagtccagttgctaacaatattaaattccaaaatgacttgtaatgtaggaaaataaaataaacatcctgcacacttacccaatccgggtaaacagcttcccatgggcatggagaaaactgaggatgaaccttttgttcagctgcatgggaaaaagggagaggagaaaacaattaaactttccccagtttcctgttactgaacagagtccccagtgacacaataacctggccagggtctaaggggtgggcactagggatgggaaccaaatggacatgcccaaactctcacagacccagggcacatgcccaacagctgccgctcagctgagccaagatgacaacaggctcagtgagcagacagcaccctctgccggcagtggcacctgtgtgcaggggatgaggcggtgaatcctaataagcaggatataaagaaaggtgcccacagctctctgaggatctaggagccactccggctccataatcatggaaatgaaactctaacaggagcaaggataatagtgaaggccctggttctatttgggttatttttctacctacctagctaggaaagcaggactctttgacaaccaagagcaaggtaacccaccactaactagctcatcaaattgtacttcaccagctttaaaaactagagttcatgttctaggtctggagttgaaaattcaagtgtctaaagggctaggcgtgaagtatgctgatggagacagtagcaagctatgactattccactccagttttggccaaatcctctatgtaggcccaagctggaaactgcaatctgggtttttttgtttttgttttttgagacagaatcttgctctgtcacccaggctggagtgcagtggtatgatttcagctcactgcaacctccacctcccagttcaagcaattctcgtgtctcagccactcaagtagctgggattacaggcatgcacccccataatcggctaatttttgtatttttagaagagacggggttttgccatgtcggccaggctggtctccaactcctggcctcaagtgatccacctgctttggcctcccaaagtgctgggattacaggcatgagccactgcacccagcatgttttgttgttttgagacagggtctcactctgtcgcccagactggagcacagtggtgtgatcacagctcactgcaacctcaacctcctgggctcaagtgatcctcctgcctcagcctcctgagtagctgggactacaggtatgtgtcaccacacctagctaatttttaattttttgtagagaggagttctcaatacgttgcccagactggtctcaaaatcctgggctcaagcaatcctcctgcctcagcctctcaaagtgctgggatcacagaggtgagagtcactgcacctggctgaatctggatttttatgtgaaatactctggcttttacatgttggctactaatgaaaataatttaagcattaaagaagccaaaaaacacatttgccagctacatctggcccatgagccaccaatttacaatcgtggttcaaggttctagaaaatctacttccattgaaaccaaactatttctcagcaaaacaagggagggaaaaaaatttcaattcaaatccaaagcaagtagaaacaatctaaaaactaaacctccttgtcatcttccctggtctcctagaagcagtatattcagggctctgtagccagccaggaagagaagtgaagaatcttgaccccaggatcccagtggtcagggcaaggagtccagtatcgctgggcagtctgccccacaaggagaaagtccctgtttaatcctctgacaaaacagaacatcaatcaagctatggcagttccatctatttcatatggaagccaagtgtgggaaaagaggtacattctcacttaaccaatgatcaacatcaaactctgcatagaatgttcactctatttttgctttaaatgagttacactcatttaatttatagataaaaagctcagaatatttcattgaagataacctgtctatacagcaaggtgagtcagggccagggacactgggttccatcaacagaatggaagaggccgggtgcagtggctcatgcctggaatcccagcactttgggaggccatggcaggtggatcaattgaggtcaggagttcaagaccagcctggccaacacggtgaaaccccgtctctactaaaaatacaaaaattagctgggtgtggtggcaggtgcctgtaatgccagctacttgggaggctgaggcaggagaatcgcttgaacccgggaggcagaggttgcagtgagccaagatcataccattgcactccagcctggacaacaaagagcgaaactctgtctcaaaaaataaaacaaaacaaaacacaaaaacactagaatacaagagtgaggaacagctgcaaaataaattgcccatggctacaccaacattagtggcgaaacctggccagaatgcagatctctagatttcctagtagaggaagatggtgagaaacagggaccttcccatgaaagacctctgccatttacctgcggtgggatcttaggcaacggatctaaatgctcgcttgacctgtaaacactcaattgttaacattctctcctaacaaatgatgaagcaagtggtgaaatgaagcaactggagaatctgggagaagaatatgtgggagttttttgtgttattcttacaacttttccacagataggatgttatttcaaataaaaagttaagaatacacattctctctctcttcctattttaacttggttatccctcttcctatagatgtcaatcataaattggttaattcattcataatcagaaggaatcccttataaactggttctatttatatcctaagtctttcataaactggttatatataaaggttacttgtacagccgggtgcagtggttcacgcctgtaatcctaggactttgggaagccaaggcaggtagatcatctgcggtcaggagttcaagaccagcctggccaacatgttgaaaccctgtctctactaaaaatacaaaaattagccgggtggtgggtgcctgtaatcccagctactagagaggctgaggcaggaaaatcacttgaacttgggaggcggagactgcagtgagccatgattgctccattgcaccccagcctaggggacagaatgaaactgtctcagagaaaaaaagaaaaaagaaaaaagatacaggccaggcatggtggcttacgcctgtagtcccagcacttttggaggttgaggcgggtagatcatgaggtcaggagttcaagaccagcctggccaatatggtgaaacccagtatctgttaaacaaacaaacaaacaaacaaacgaaacagccaggcgtggtggcacgcacctgtagtcccagctacttgggaggctgaggcagaagaatcgcttgaacctgggaggcggaggctgcagtgagccgagatcacaccactgcactccagcctgggagacagagtgagactctatctcaaaaaataaaaaataaaaataaaaagatactaacccacttcattcaagcctaaataccatcccccaagccaactcagaaatttaagcaactttactttagtaaatggcagagtcagaacttgaacccaggtcttcagattccaaacacagttttctttctcttatcctacacctatctcggggaaaagaactggtgagctgattcaaccaagggctaacgagggaataagagcaactaagaagccgttcaagttttgcttttaagttttccttcctgattaggtaggaaactcatactgtttgaaccacaacacctcctggactaaaacgagagccccaagaggtttggaacatctgtgcttctatgtgtacttcacaaacatccttcccttagggtaggagatgaagcccacctaattacctgagtctgtacttgccactaccgtattttaactgcaaaaagtcgatttcaatgcattacttttcaactagtgggagtgaagaaaatctcagataaccttttcaaactatacacacactctccctaaccttagttaatgagaaccaccgctttatttttagtctgaaggtcactgttaaacatactttctctttgttgtcatcaataacacttcaattaggaaaggagctaaaaatgtagatacatctagaaggtatgtgacatgaaggagcagatttgttacatattgatcaaatcggacctaaacaacatttacaagagacaatatgaagtcaactagcactgagacagatactttggagaactttttttttttttgagacagagtcttgctctttcacccaggctggagtgcagtggcgctatctcagctcactgcaagctccgcctcccgggttcacgccattctcctgtctcagcctcccaagtagctgggactacaggcgcccgccaccacgccccgttaatttttttttttttgtattttcagtagagatggggtttcaccgtgttagccaggatggtctcaatctcctgaccttgtgatccgcccgccttggcctcccaaagtgctgggattacaggcgtgagccaccgcgagaactcttaactgaccccaaacccatagtcacaaaaaccttagtccgagcttccttcttccttcctaacacatcagcatggactggcttccatttctaccacttttcaatttttatcatttatcttagagacagtgtctcactctgttacccagcctggagtgcagtggcaacatcacggctcactgcagcctctgactcctgggctcaagcaatcctctcaccttagcccgcaaagtgctaagattataggcgcataccaatgtgcagggctaatttattttcattttttgtagagatggggttctcactttgttgcccaggctggtctcctcactttgttgcccaggctggtctcaaactcctggcttcaagcaatcctccagttttggcttcccaaagtgctcagatcacaggcgtgagccaccttgcctggcagacttttttcatttttaacaatacacctagatggttctcggtcaggtggaaaataaatgttacttctcaaattgtgaggccacctgcgttcagatcttccttacatatttacctactgttcactgaaacaaaaatgcttcttgggtgtatccctgagaggtagtgttagaattattaaaggtcttctggctccttagctcaagtccaaaacaaattcactgtggactcctgagctcaacccaaagagacaccaatggcagtagatggatgggtaggtctctggacacacaataaagtccgtcctgtcattaactgtgggattataagtaaaatgttttggattgttcctggactgtaaaatggaatttctaccactgacattacctaattcagaactaaaaggatgaaatgaaataatacaaattaaagtagtctgaggagtagatgttttacacaagccttgaaagttatcactcaaaattgtgtctaagggcttggtgactgtggagcaaggaaggagagagaagctgctcagaggcaacaacgcaagaggaggggattctgaaacaggcccaatttcagttccgaaagagtcgttcctgcttctacagagtcgtgtgaaaaaccgaatttctgaaaagtgaatcattttaaggacagtaagggtagtcagtattaaaggaattccaaagtgcattttaaagtgattttgaggagcataaattattattctcttatctgtatggaatgtctctatttttatatacactttttttttttttgagacagggtctcactctgtcacccagactggagtacagtggcacaatcaaggctcactgttgtctagacctcctaggctcaagtgatcctcccgcctcagccttctaagtagctgggcctacaggcacacacaatcatgcctggctagttttttattttttgtagagacggggtctcactatattgccaaggagtctcaaactcctgggctcaagcgatcctctgcctcaccctcctaaagtagtgggattacagacatgagtcactggtcctggccccatatatttttaaaaaaacaaaactttcttgcattttagaaaagggatctatcctcttagatatgagacaacataggtggagaccaaatttcatgagtacctgttagtaaaacagccaggactttcacagcattcaatcaaagcccacttatcagtctctctcaagcaatgagatcacaaggcggaggaggatgtgggcgcactggtgatgttgttcacacgtcatcctcatccctgcgctcctatgctgggcataagaggaaaccaacaagatagggtctctgatgccaaggagcttatagtccaagaacaaagataaataacataccaacttgcccactggccatttatgctcccacacctaagacaaggcctatgaaggttccaggaggcactgtgtttcccttactgtcatttttcctgtcacagagatgagatggaatctaagaaaaaaaaaaaatgagggaaggggggcctggtacaaaaaatgtggaaacccatcagtaatgcaataatcattcagtaaagacagagttattcattattagtactttcagcattcctctttccaggatatacagattaaaaaaaaaaaaaagcacgggaaaaccaaatagcgtgactcaaatgcctcgtaggaagatgtagcaaatcaaatcaacccttaggccccttacttggaccaaagagccacgctgaggctgaggtagaaccgggatggcaacagctcttcaccctttacttcctccactccagaactgttcagggctggatgacagctcaattagcttcaattaaacataagttcctgtacagatgtcccacttaagatggctagatctgagacatgtgaatttaagtgtaaaatgtgccttttaaaactacctcttccaactaacgcaccccttgaaacaatgcctctcaactttgcactgcagtttagtgctgcctcttatactaaagcaatttgttacttcgttatccctcctagttaaagccagcagactgagggaaattgagctaaatcagtaggcagctccagaaaacacagccaaccagcagagggacagccgagctcagagtacctggctggctctcagaaaggaaactggcaccaggtataaagaaaagaaggggccaggcacagtggctcatgcctgtaatcccagcactttgggaggccgaggcgggcggatcacctgaggtcgggagttcgagaccagcctgaccaacatggagaaaccccatctctactaaaaatacaaaattagccgggcgtggtggctcatgcctgtaatcccagctacactggaggctgaggcaggagaatcgcttgaaccaggagacggaggttgcagtgagccaagatcgcaccactgcactccagcctaggaaacaagagcgaaactccatctcagaaaaaaaaggaaaaaaaagaaaagaaggaggccgggcacggtggctcacgcctgtaatcccagcactttgggaggctgaggtgggcagatcacgaggtcaagagatcgagcccatcctggccaacggtgaaaccccgtctctactaaaaatacaaaaattagctgggtgtgcctatagtcccagctactcaggaggctgaggcaggagaattgcttgaacctgggaggtggagactgcagtgagccaagatggcgccactgcattccagcctggtgacagagcaagactccaactcaaaaaaaataaagaaaagaaaagaaggagccacgaatatgttcagtattttgtatttactgctcatgtgtttactgggggaaggaatatgacagaatggtatgaacagagaccgctgatcttaagagttgaaaacctgggttcgaattttggtcatgccatttatttgctgttaattatcaggaagtcacataaatcttctagggctgtttcttcaacagttaaatgagtgagatcagtactgctaattccacaaccctgagtgtatgtctatcacctgaacagcttttataaaaaatacagattcctcactcctacagaatcagaatcctcaaggacgagagaggggcacttcgaatcaacatttttaaaggtctccaggtcactgtgaaagatagccagatttggaaaccactgggctatatcagacactggcaaactatggccatgggtcaaatgtagcctgccacctgtttttgtatgacccatgagctaagaatggtttttacatttttttaatggctgaaaaaaaaaataagagaatatttgatgacatgaaaattatatgaaatataaatttcagtttccataaataaaattctgttgaaacacagccaccctcatttgtttacatattgtcagtggctgctttccccctacaaaggcagagctgagtagctgcagcagagggcacatggcccacaaagcctaaaatattttattttatttatttatttatttatttatttatttatttattttgagatggagtctcgctctgtcacccaggctggagtgcagtggcgcgatctcggctcactctaagctccgcttcccgggttcacgccattctcctgcctcagcctcctgagcagctgggactacaggcgcctgccactacgcctggctaattttttgtattcttttagtagagatggggtttcaccgtgttgaccaggatggtctcgatctcctgacctcctgatccgcccgcctcggtctcccaaagtagcctaaaatatttactatccagatcgttacagaaaaaaaatgtctgctgatacctgggctaaataatctacaacgctggtgtctcaaaagatgtttcttcctgcaccgcacttcagagctaccacacacgtgtactggaaacagtcacgattctcatgagctaagaggtgaagatgggtagtgatgaagagtatggtttaaaagacccccctccgccaccagaatattctgatatccacccacttctcaccaccacaggagaagcaccaattttcagtatttctcccaatgctaagagcccacaaatgcataattctaagtaaatataacttttcttgccagcttctgtgtaagcaccatcccattctatgatagcacaagtgacaccaaatgccaaagactcctgctctcggacagtcacacactccaaaggctacagagaaatataaatgggactctccaggtttccacctgcagggtagaaacagaacacacccaagcccaacggagacttcacttaggccagagggctcctggacgtttcccaaaacatccctatcaaaggaaagtgccagattaagatttatgaatccctatgctgtggtgtgacaatctgtaacaaccaactcaaatgtgccaccagcttagcatctccaggtacacagaaaaagagaaagaaagttcagccaaagggcaacactgttgctctgactgagttactttctgaatgactcttctttctgcctcatctctctcatgcctgggaactctcatgcccatccacccaaatagtaggggagctaggacacgctgtgtctgcactccaggaagtgagagagaagaggaaatggctgaagctcccactgcgtgatcccatggacaaccagataacagttttccaagagcacatacataagctcaaacccattttttttgttgttgttgagacagagtcttgctctgtggcccaagctggagtacactggtgcaatcccagctcactgcaacctccgcctctggggttcaagcaacaatcgtgcctcagcttcccaagtagctgggactagaagcacgtgccaccaagcccggccaatttttgtatttttagtagagacggggttttgccatgttgtccaggctggtcttgaacttctggcctcaagtgatctgcccacctcgggctcccaaagtgctgggactacaggcgtgagataccgtgctcggccatcaaacccatcttataaatcaacaggttgacacagcgtaagagggatggtgaagacttcctcacacatggacccatacatttattcattcaacaaaaacctactgggcacattttatgtacaaagcacagtgcacaagctgtgaacaaggcagagataatccttcctctatgggtaacacagacaattatgaagtgccatgactggggaaggctaggatgctgtggaaatatacagaagcagcaccagagatatcctctcagaggaaaagacctttgagttgaaaagtgagggttgaagaaacagttggttttggagaggagagggagtcacgtcctggtgtgtcttaagcaaagggaacaacatatatgatgttctcaaaagtggtacattgtagactggcatggctagatgattgattctgtaagaaagtctggagaagtgggcagggcatgttggacaggtccttgttaaagaatgtgatcttcggccgggcgcggtggctcacacctgtaatcccagcactttgggaggccgaggcgggcggatcacgaggtcaggagatcgagaccatcctggctaacacggtgaaaccccgtctctactaaaaatacaaaaaattagccgggcgtggtggcgggcgcctgtagtcccagctactcgggaggctgaggcaggagaatggcgtgaacccgggaggcggagcttgcagtgagccgagatcgcgccactgcactccagcctgggcgacagagcgagactccgtctcaaaaaaaaaaaaaaaaaaaaaaaaaagaatgtgatcttcattaaagccactgaagggttttcagcagggaagtgacatgagcaaacctgtatttgtaaaggttgttctggatgtttagaaaacttagggttttggccagctgccccgtccgggagggaggtggcgggcgcctccgcccggccagccgccccgtccgggaggtggggggcacctctgcccggccgccccttctgggaagtgaggagcccctctgcccggccactaccccgtctgggaggtgtacccaacagctcattgagacgggccatgatgacgatggcggttttgtggaatagaaaggggggaaaggtggggaaagaatagagaaattagattgttgctgtgtctgtgtggaaggaagtagacatgggagacttttcattttgttctgtactaagaaaagttcttctgccttgggatgctgttgatctgtgaccttacccccaaccatgtgctctctgaaacatgtgctgtgtccactcagggttgaatggattaagggcggtgcaagatgtgctttgttaaacagatgcttgaaggcagcatgctcattaagagtcatcatcactccctaatctcaaatacccagagacacaaacactgcggagagccgcagggtcctctgcctaggaaaaccagagacctctgttcacttgtttgtctgctgaccttccctccactgttgtcccatgaccctgccaaatccccctctgcgagaaacacccaagaatgatcaataaaataaataaataaataaataagaagaaaaaaaaaaaagaaaacttagggtttttttgaggggtgaggggttgggtggagtcaagtgtgtggaggtgaggagaccaggtaaaaggttgttgttgcaatcatccactggcaatggaaacacagagggagggaagatgtgaagattgtcattccacacttggacaatcatgagccctgtctttaagtctcagtggttctagttccaagtaacttaatttacagactagcggtggtgcagaaccaagcatgagtattttaaaaagactaaaggccaagcacggtgggtcacgcctgtaatcccagcaccttaagaggctgaggcgggtggatcgcttgagctcaggagtttgagaccagcctgggccaacatggcaaaactccatctttacaaaaaataaaaataaaataaaataaatcagccacgcatggtggcgcacacctgtagttctagctacttgtgaggcttaggtgggagaactgctggagcctgggaggcagagattgcagtgagccgtgatggtgccactgcactccagcctgggagacacagtgagacttaatttttaaaaaaaatagatagacagatttgatacggattaaataggttatccaggcaatatatacaagaaaactcgtgagaaaaagagatgaatgttgtagggaaagagcatacacatcactatctgtgagaatttaaatccacttctttttggagagtaatgtggcaaaacccagacaaaggtatgtatgtatgtatgtatgtatttatttatttattattttgagacggagtctcactctgttgcccaggctggagtacagtggtgccatcttggctcactgcaacctccacctcccaggttcaagggattcttccttttttttttttttttgagacagagtctcgctctgttgcccaggctgtagtgcagtggcgtgatctcggctcactgcaacctccgcctcccaggttcaagcaattctcctgcctcagcctcccgagtagctgggactacaggcacgtgccaccacacccagctaatttttgtattttcagcagagacgggatttcaccacgttggccaggatggtctccatctcttgagctcgtgatctgcccacctcccaaagtgttgggattacaggcgtgagccactgcgcccggccaaaagaatcctgtgcctcagcctcctgagtagctgggattatagacacgagccaccacgcctggcccccaaaggtatttaaaggaaaaggtatttctgtcaggatttaaggattctgatcctgagtagtagcaattccatctgctacattccagcctaagtgagtgggcaaaaagagactacacttaacatcagaatgaaagccaaagtccttacaatggcctacaaaagacctatataatcttactccactacctccttctgctccttaaatgtgatgagtatgctcccaactcgggcctttgtatttatcttccagcccagtggttcccaaactttacagtacattgaaattttcctggctgggcctggtggctcatgcttgtaatcccagcactttggggggctgggcggatcacgagatcaagagctcgagaccagcctgaccaaatggcgaaaccccatctctacaaaaaaatacaaaaattagctgatggtggcacatgcctgtagtcccagctactcaggaggctgaggcaggagaatcacttgaacccagaaggcggagggtgcagtgagctgagatcatgccactggactccagcctgggcgacaaagcgagactctgtcgcaaaaaaaaaaaaaaaaaaaaaaaaaaatatacacacacacacacacacacacacacacatatatatacatatatagatggtcaaaacttctatagcatcttctatgtgtagcacactactctaagcactttgcgtctgttaacattacaacaattctgtgaggataagtactactattatttccttacagaaaacagcaaagaggttaattgacttgcctagagcctgagctctttatttctcgccttttaaaaaaggcgaccttggctgggtgcagtgactcacgcctgtaatcccagcactttgggaggctgacgcaggcagatcaacggaggtcaggagttcgagaccaacctggccaacacggtgaaggaccatctctactaaaatcacaaaaaaattagctgggtgttatggcacatgcctgtaatcccagctactggggagactgaggcaggagaatcatttgaactgggaaatggaggttgcagtgagccaagactgcaccactgcactccaggctaggcgacagagtaagactctgtctcaaaaaaaaaaaaaaaaaggcaacctcatttgaacctaggaattcaagaccagcctgggcaacatagagagaccttgtttctacgaaaaaataattagctgggcgtggtggtgcagcctgtagtcccagctactctatgggctgagttgggaggattgcttgagcccaggaggtgaagggtgaagtgagctgtgatcacgccactgcactcccagcctcagtgacagagcaagacgccagctcaaaaaaaaaaaaaaggaactggcgcgatggctcacacctgcaattccagcatgttggggggccgaggtcaggagttcaagaccagcctggccaacatggtgaaaccccatttctactaaaaatacaaaaatgagcacggtgtggtggcatgtacctgtaatcccagctagttgggaggctgaggtaggagaattgcttcaacccaggaagcggaagttgcagtgagcagagatcacaccactgcactccagcctgggcgacaaagcgagactctatctcaaaaacacacaaacaaaaggcaactttttcagcagaaccgagacagacacggagaatgtttctataaagaccaaaagcaaaagccccaaacaaaacccaccaatggtttcagctttctttcaccgagagaccaccaggccaaaccaacagagaagtcttggagattaaggtaagtaaatacttccagtccagacaataccatgcaagttggcagaagcatgtaacaacatgcaccctcaaatagtatcagtaagaagagataaaagataaaattgtaaaactgaacaagtttattcatggtgataaagcaacaggagcctgatgaataaggaaagagtccttcaaggacgggcacagtagctcatgcctgtaagaggatcacttgggcccaggagtttgaccagcctgggcaacacagtgagacctcatctctacaaaaaataaacaaaattagccagctatggtggcacacgcctgtagtcccagttgggaggctgaggtgggaggatcacctgagcccaggaggttgaggctgcagtgagccgagatcgtgccactgcactccagcctgggtgacaaaacgagaccctgtctccaaaaaaaaaaaaaaaaaaaaagttcaaggaatatgtgtgcattcgcacactaataaagggactgtgcacagtccagaaaaatatttgaaaatataacctctctacctacctaacgccatacaggaaaacccctgaatctctcaggaaagggaggagcacgaactaatctaagaacccaaaggagaacgaagcttcagtttaagatagatgtggtcacaaagacggtttcacaaaccactctgctgtggttatttgccataaagcaaataaccagcacacagggagctttggctaccttgtgcgagcttcagatttaagcaaggcaccaaataagggaaggattctggcgcatcaactcccaggaaaagtgtttcaagttaaaaatggtcattcaggtttggatgtgaacttctgtatctgctctttatcaacagaggcaactctacctccctggcagctagcagcagaaaaagaagaaaactgttagaatacaaatggattacacaaagacaacaacatggcctgctacagcctggcattcgccttgacactaaaaacaaggctagaaacacgcattgcagatcttctgggattccacatctgagctgaaccaagcatgtccaggagaaggcaggccatgatgtcactttccccccccacagccagatgcttcaagatgaaggctgtaaaccacagcactgttggtgagagactcagtttcactgtgactggaggcaaggcctgcttccagctagtttttttggtcaatcaaatcttttctgtgctggttcccagacccaaactctgtagttcaaaagtcaaagcaaacacctcaaatcttttatctttgatccaattctttatcttccaaattctctcttcgtcctctgtctctgaacaatgaaaatcaatcttaacaaggatccacaaagcaaggaaaacatgggcattaacttcttcctaatttatttaaaatgctctgtcactgctatcattaaacgtatagaaaaaaatttgagtttagagttaaaagggaagaggccgggcgcagtggctcatgcctgtaatcccagcactttgggaggccgaggtgggtggatcacctgaggtcaggagtttgagaccagcctggccaaaaatggcaaaaccctgtctctactgaaaatacaaaaattagctgggtgtgatggcgggtgcctgtaatcccagctacttgagaggctgaggcagaagaatcacttgaacccgggaggcggaggttgcagtgagacgagatcatgccattccactccagcctgggcaacagggcaagactctatctcaaaaatatatttaagaaaaaagaaaaaaaagtcgggcgcggtggctcacgcctgtaatcccagcactttgggaggcccaggagggcagatcacgaggtcaggagatcgagaccatcctggctaacacagtgaaaccctttctctactaaaaatacaaaaaaaaaaaaaattagccaggtgtggtggcgagcacctgtagtcccagctactcaggaggctgaggcaggagaatcacttgaacccgggaggcggagcttgcagtgagccaagatcgcaccactgcattctagcctgggtgacagagcgagactccgtctcaaaaaaaaaaaaagggaagagaagaatgacagcgatacaagtaaataaactgctggttatacaagtatgcttacattgtcacaatttatcacctgtatggctctgttatgtgcacttttctgtgtatatatatttttggaagatttcttttaactctgcaataattttttaaattgccacaactttttctactagtccacaaaaagcctttgtttcacagccaataaataccctttgccccatatgtcctaatccccaccattattctaactctgaggtggtagacatgcagatgactggtgctataataaacaactttctgctacccctcggtggacaaagctgtgcagatgtgttgatggtgtatgctatatccccagtgtacggatgtaaagacaaggaaagagattaaaaaatctgttcatgcaaacaaaaagaaatttaggaatgcaacccataagatctcactcctggtctgcagtgaccacaagtgacagcttcctaggagcacgaagggcactattagtgccttattcaaccttttgacatatgtcacttgcaagtatttcaaaagccatagagttttatagatctgtccagaagtctaaaggaaaacctgccaaagacattcctcagaagagaatgtcaaatgtgttaacatagtttgcttgacaaattaggacctagcatctcagagatttgtggcacaagtaaactcaaaatctcaatagcaagaataaggttttagcatctttatcaagaaaaaaaatcccagaaaaatgtaaatccatagcgagtattatcacaattcctctttcccatacgcatcaggagctgcagtcctactgtgtgtgtgaaagtcaagaataggacttagtgccaatgattacaacacaaagcataacttattcctaagccaagctgggcttggctcagaaagcttcccagaatgatggaaggcatgactttagagtgagtcaacctttgctaatacataaaataaagcagagaaagaactatttgaaggattcacttctaagcttgagccaaatcaaaagctcaaatctatctacattgtgatgaatcttcagttccaactgagtgatcagacagcaccaatgtggacatctgtaccatggcccaagacattataatgacagaatcttggctgggaatctcagaagcaaccattccttgcagtttcgaaccatgctatgtttttatccatgttgttccttctgccagaaaagtcagctgaccacatctacctaaaatacttctttgacttgcaaaattaaggacaaagattacctttctaggtcgctctacctgttcaccctgagttaatctcttttacctctgtccagtgtatatatttctattattacatttataacactttattgcaagtatttatttacatatccttttttcttactagactgtgtttttgagggaaggaccaacatcacttacttttctgtgtgcagtacctagaataacaatatataaaggtgctccatgaatatttatggaaatgacctgaattgggacagggaaaaacttgatttcctcagagactactagctggcctcagaggaggttttacagcaaaatgggcaagtgaaaagagaaaaaatatctatataaaactttgaagccacttattttaggcaacatacaaaggtatatactatactgtaagataaaatagataaaaacaagaaagagaagccaaagagaaaaagataaagaggtcaccaaacagtaaggtcacgaccgaagataaacgccctttacacttactaaaggaagtttggctacaacctctggaacaattaaaatagagaatcattctgggttaaaaattcacaaatttgctattataacaatcttacaaatgtgcatgaggttgaagaaacccattttctactaagagcagaaatttcttccacaggcttccacaaagacaccacgcaacacaaacagcaatccttctctaggtctcttttttatgtatcttcatagaggctgatgacacactcaagtacaaatcagtaaaagcagtactactagtaaccaatgttacctagttacatagctctctgatggttctaagcatgaacgacacggaaaaaacagtagcaggagaggtgcctagtgatttctataataaatgctcaacaaattttggatcagaagatggaagacaactcaaaaaaccacttaagctcttaaaaataaaaatgtgtggttaatacattttataggaaccaaaacatcagaaagacagagggtacagatagtattttaaattctttctggtctagagagtctatccactcatactagggagaaaaaaaagagcacagttcacttcaatactaaatatttatgagtaaagtgaaaggcttccaagaggggaagaacctggagtttccccctggagtcaaacaaacagcccgcagactggggaaggatcacgagccaagaaaacaacgatttcatattctctatcttagctcaaatacatcagatctaagatgttgaaaagagggtagagagatgaaattctggcacctttaagagcaaagagggattttacagaatgatcaaactatggatacagctccccaagagaacagtcagaaacaaaaaccaatataggaagttggtgagaaacgcaacacgggaaaaacataaagggtagtgcagtcttaccccacataacaggcagtgtgttactatataaagtgagctgctcccagagtaacatcacctcactactccttcctatagcagctgcagattgaacaaggatccaatgtacaggtctcattcttatttggaaggctcttcacagaccacaagctggatcctaagggacgatttatagtaccccctcacgtacattccagttggctggaactcagcagctgattgctcccttgtctaacttggcaaggagccaaaggaggacttttctcagtcaactctcccaagctggaaaattctctaatgccagagttctggcttaagtcgggatatcaggttattcatgagatgccaaaactacatctttacattggctttgaacaagtccctcaagtacaccatacagattcccacagacctcaaaatcatctggatattaaggccaaagatggctactccatctctcacatagagaggaatgtgcttttcacaacaccagcaacatcaaaacaaacctttcataaatcacaaatcaatctcaattcttaaaataggtgtcaagcaacaaacgcaacattaaattacttcctaggctggacacagtgactcatagctataatctcagcactttgggaggctgaggtgggtggatcgcttgagcccaggagtttgagaccagcctgacccacatggtgaaaccccgtctctacggaaaatacaaaaattagctgggcatggtggtgtgtgcctgtagtcccagctactcaggaggctgggaggggaggattgcttgagcccaggaggcgaaggttgcagtgagctgagatcgcgccactgcattccagcctgggtgacagaacgaaaccccatctcaaaaaaaaaaaaaaaatttccttaaaatcttgtattccaccctactgaaaactctccctattccactagctactcaaattctctcactattgttaatccctaggccatcaagatccaaatcccaagtcaggttctctgagaggaaatgaaggagtaaaccttaacaaaatgtttttgaccttgtcaagcttcaaaagtagtggttctcaaccagaatatgaccacccatcccaggaactgtttggaagtatgtgtgggccgttactggcatctaatgagcagagccaggaacgctaaacatcctgcaaggtcagacctgcataatgaagaactgtcggccgggcacagtggctcaagcctgtaatcccagcactttgggaggctgaccacctgaggtcaggagttcgagaccagactggccaacatggcgaaacaccatctcttctaaaaatacaaaaattagcagcgggtggtgacaggagcctgtagtcccagctactggggaggctgaggcaggagaaacgcttgaacctgggaggcggaggttgcagtgagctgagattgcgccactgcactccagcctggacaacagagcaagactgcctctcaaaaaaaaaaaactgtctgcttaaaaggcgataacattctcattaacaatcaatttcctaacagaagaaccttatcattaactgcattcacctctcccagcttttacagcagtggtaaattttttctgtaaaaggtcacagaaaataatttaggcttcgtgagccacgtacatctctgtctcgtgttgctctttttaaacaactcctgacataagaatgtaaaaaccattcttagctcataggccactggcaatattttgcccatccctgttctagggtattacctgaatcattagtctgtttatattaatttagagatgctggttaaaataaagtgtgatggagtatgctataaacaacaccaataatgcatatgacaatcttaaagaatgaaatatgaacttcagaacttagccttaccacctaagaactggtgcatgtgttgggcttctaatcacctctcattctcgtcccctgtgcatttcaggtgctttaggttttcttctgaatgttcattttcaaacactttaccaggaagagcacagaaatgcctttcccccctcttcaggatctagtactttctgttcaccatgcgtgccactcaaagtcttttacaattattgctgttaacatcttctaaaatgtctaaaccaaaccaaggcctggaaattctgacgggtatctgggtcctgactttccggatggtaactaaaggtcacgtggggtggaaagtggcctgtgggtaacacagaatatacacacgcacgcgaacaggatatgctggtaatccggcttcctgagacctggtgagttttgagagttctcatcaacactctcggggaggatgaaaaaccttaagctgggaaatggcagattttaagcaagtgctcattgttagatctctgtctacagcagaatgggaaggtacaccatttactcctctatattttatttgcctaaaaacacaatacacaaaaaataaacaaagtgactactgagagaggtttcttcagtgtggaagctggcgtttgcagcatggcttatgtcacgtctcaaccccagaaagatgaagagtgtggttttggtgtttaaccagcctcagcagcaccctggcactctgtttcttcccccagagaactctgctctgttagaggaaagaaaccaacctcacatattgaaacaaaacggataggataaaaataaagccctgaagtggtttggtgaccgaggtcatttggggcattaagggtttataggtagggctgatgtactttgagaaacttgcactcactaccaaccacaaagacattagccttacagtccagcagtgatctggacaaagcagccccaatccttgcctaccaggggctgctccttgcaacccacctcacattatcaacatctgaaaaacccggttctggttctgaccttctttgaggatcccactaagctgtttctcatggcctaagaaaaagaaaaccaatctgcttcttcccacagaaagaggctctaatgaactgctgtcatcacgtgctgccaaactgcagttcacacacttttcaaatagcttccagagtgaagagtacagcctgaggtacatattgcaaactactttacaaaagcataggactaattaaagacatgaagtcaactcacaaaaaccctaaaaaattttctgatgcccaccttacagatacggaatctttttcttttgaggcagggtctcactctgtaacccaggctggagtgaagtggagcagtcaagactcactgcagcctcaaccttccagaccagagtattctcccacctcaggctcccgagtaactaggaccacccaccacacctggctaattttttttttttagtagagacagggtatccctacgttgtcaaggctagtcatgaatgaactcctggattcaagcaatcctcctgcctcagcctcccaatgtgccgggattataccggcgttgagtcactgttcccagcaagatatggagtctttatatccatgaggccaaaaaattaagctggctttctctgtcatgatgatataattatgagacaatgaaataactgggttatcacagataaagcacttacctactagtgcagagactcaactattctttatcattatagattaaatcagtgcttgtgctatccagagagaaccaggccaaaagctttcttttttaatgtatttacttatttatgtatttttaattatttttattattattttttttttttttgagacagagtctcgctctgttgcccaggctggagtgccgtggcgcgatctcggctcactgtaagctccacctcacaggttcaaaccattctcctgcctcaacctcccgagtagatgggactacaggcgcctgccaccacacccggctaattttttgtatttttagtagagacggggtttcaccgtgttagccagggtagtctcgatctcctgacctcgggatccgcctgccttggcctcccaaagtgctgggattacaggcgtgagccactgcacccagccttatttatgtattttttaagtgaaatatttttattattattagagacggcatctcattatgttgcctaggctggtctccaactcctgggttcatgcaatttcccacctcagcctcccaaaatgctgggattataggcatgtgctactgtgtccagtctaaaagctttttctaagcttcataatgggtactggctctcaaactataaacctaaagcctcatgatacaactctaggaattagaactcattccaacagaaagcaagtcaccttgtctaaggaaaccttataaaaccatgctctgatctataattgttttgcggggagggtggaggaattagatgtgtaccactcatacacagcagctttcacagcagcagcagctcaggtgcacaaactacgcaaggggcactgaaaagacaaatgatgagtctaaagaaaatattgggtggggagcagtgactcatgcctgtaatcccaacactttgggaggccgaagtgggcagatcactagaggtcaggagtttgaaaccagcctggtcaacatggtaaaaccccatcgctacttaaaaaaatacaaaaattaggccgggagcggtggctcacgcttataatcccagcacttcgggaggccgaggtgggcggatcacaaggtaaggagatcgagaccatcctggctaatatggtgaaaccccatctctactaaaaatacaaaaaaattagccgggcatggtggcgggcacctgtagtcccagctacttgggaggctgaggcaggagaatggcatgaacccgggagacagacctggcagtgagctgagatcacgccagtgcactccagcctgggcgacagagttagacttcgtctcaaaaaaaaaacgatcaggcacggtggctcacgcctgtaatcccagcactttgggaggccgaggcgggcagatcacgaggtaaggagatcgagaccatcctggctaacatggtgaaaccccgtctctactaaaaatacaaaaaattagctgggcatgttggcaggcgcctgtagtcccagctactcatagtcccagctacccgagaggctgcggcaggagaatggtttgaacctgggaggcggagcttgcagtgagccgagatcgcagcactgcactccagcctgggcgacagagccagactccatctcaaaaaaaaaaaaaaaaaaaaaattagccgggtgcagtggtaggtgcctgtaatcccagctacttggcaggctgaggcatgagaatcacttgaacctgggaggcgaaggttgcaatgagccgagatcgtgccgctgcactccagcccagggtgacagcatgagactctgtcccaaaaaaaaaagaaagaaaagaaaatgccacctacataacacactttcaaaacaaaaaactatacattaaaaaaaaaaaaaatagccctcaagcaaatacaacaagttgagcatgtggtgaacgttctgtgctacaggccacctggcctgggttttccacagggaagccatgctcctttgctaaccaactttcactttgctggtctactgattaaatgcaaaaagaaaatatactatccaactttgtgtagccacgtattccaactcagaaagaaaactgtccttctcaactttcaatagcacctctaagaaaatcacgagagatttgggaagaggcagcatgcaaaattccaagcagaaactatgagctccagccctagggaaacaaggttatcactgtcatcatcttacagatagaaaactaaagctcagccaggttacagaacatgcccaaagtctcgcagctaatatctgataaaagtaggacttcaggccaggcatggtggctcacgcctgtaatcctagtgctttgggaggtcaaggcaagaggatggcttgagcccaggagtttgagactgcagtgagctatgatggcgcccctatgctccagcctgggcgacagagtgagactctgtctcaaaacgaaaaaaacaaaaaaactagcacttgaactcaggactttccaaagctctgcactatcctggctctgacatacaaatactagacaaaattatgaaggctatcagccaggctctagagagatacaatggatttgagggcaattactcagagaaggatctccgaagtccagtagcaatagggaaaaaaaaaggtgaatataccagtgtgtataatatgccactaataatgcaagagaagaaaaataatcacatatacacctacataatatatgacctactgaaaatagttctttagagtccaggtgtagtggtttatgcttgtaatcctagcactttgggaggctgaggtgggaggatcacttgagctcagtttgagaccagtctcagcaacacagcgagacccttcctctatgaaaaataaaaaacattggccaggcatggtggcacatgcctgtagtcccagctactcaggaggctgaggcaggaagaccacttgagcctgggagatggaggcttcagtgagcgatgatcatgctgctgcactccagcctgcacaacagagaggaaccatgtctcaaggaaaaaaaaaattcttcaactaaaatactttaaaaggcaatcactcctctgtgtgatctctttcaacctctattcccactaacttagaaaccaactccggcattacagcctaggcacttttccaactacaccccagcctttgaaacaaggtcatcaactttccatgcccagggggcgtcaaattaatgccccattccccaaggtgtcactagttcaagatgcttccttacgaaatgggcattttcagactcaatctttcgaaacaataattggtctatcagatgcctaacatttcttgaactctctatgctctattcatgtggcttgagaagtttctctctacacacaggaggaaaggcctacagttgtaactttaattgtgttactttgataaaacagaaaaataaggccaggcgtggtagctcacacctgtatcccagcactttgggaggttgaagcaggaggattgcttgagtccaggaaattgttcttctgtttttttctggttttttttttttttttttgagacagtctcactccacaacccaggctggagtgcagtggtgcaatcttggctcactacaacctctgcctcccagcatcccgagtagctggaattacaggcatgcaccactatgcccggctaatttttgtatttttagtagagacggggtttcgccatgttggccaggctggtcttggactcctgatctcaaataacctgcctgcctcagactcccaaagtgctgggattacaggtgtgagccaccatgcccagccaagtccaggagtttgaaaccagcctatacattttaaaaagcagccaggcatggtggctcatgcctgtaatcccagcactttgaaaggccaaggtgggtggatcacctgaggtcaggagttcgagaccagcctggccaacacggtgaaaccccgtctctcctaaaaactacaaaaattagctgggcatgatggcgggcgcctgtagtcccagctactcaggaggctgaggcgggagaatcgcttaatcccaggaggcagagattgcagtgagccgagatcataccattgcactccagcctaggaaacagagcaagactccgtctcaaaaaaaataaaaataaaaataaaaagctgtaaattttttttaattaaaaagaaaaaaggctttgccctacttaacccaaaccactggcaatttcctccaactaccaagacacagagagacactagcatgtttgagttcaaaatgcctaagtgcattgtctaaaagaatagcccttcaactttttaagtcagcaaactgtggggtaaaagattcagtcaatctccaccctaccaaatttaatggatagaatagtgctgcttttgctcaattaacaatgcagacatgacaagtaaacagtgagaaattccagaaacaaattattatttccagaatcctaaggtatcttatgggagatcagccccctgactacctcccaagtgcacaccatggcaccaaactagaatgtggctctggcagaaggctcagcctcctctctaccctccaactttctcacattggcctccaaattaccacagatttaggtgccctgtgagccctctgctgtttcacaccttctctgtctttgctcatgctattacttctatttggaacactctcttcccactctgcccagttaacttttccaggaagccttctgaattcactttcctctctcctcaccccaaaccatgcctctgccagggctggaccaagagcctctctctgtgcttccacagtacccaatacatacctccctcctggcacccaccacaatacaatcaaccttcattgttcatggattttgcattgtgaattcacttacttgctaaaacttacttgtaacccccaaatcactactcatgatgctttcacagtcattcctagacatgcacagagcagcacaaaatttgagtcacctgaggtgcatgttcctagctaactaaggtcagaaaaagcaactctctgccttcgtatttcaggtcatacttagaagtgtccttggccgggcacggtggctcatgcctgtaatcccagaactttgggaggccgaggcaggcggatcatgaggtcaagaaatcgagaccatcttggctaacacggtgaaaccccatctctactaaaaatactaaaaattagccgggtgtggtggtgggcgcctgtagtcccagctactcgggaggctgaggcaggagaatggcgtgaacccaggaggcggaggagctgagttcacgccactgcactccagcatgggggacagagagaaactctgtctcaaaaaaaaaaaaagtgtccttttcatggtgtatttagtatcacatttctgagatttttgttggtgattttgttgtctcacgtggcccccacaccactgtgcttggggagtgtgccgaagtgtgtgactccctaagtgcaagaaggctgtgatgtgttttacagggaaaatgtgtattagataagcctcattcagctatgagttatagtgctgttaggcagtgagctctctgttaatgaattaataatatatattaaataaggtgtctttaaacagaaacccacataaaacaaggttatataactggtcaggtgtggtggctcatgcctgtaatcccagcaatttggaaggctgaggtgggcggatcacttaaggtcaggagttcacgacctgcctggacaacacagagacaccctggctctactcaaaatataaaaattagccaggcgtggctggggacagtggctcacgcctgtaatcccagcactttgggaggccgaggcgggtggatcacgaggtcaggagattgaggccagcctggccaaaatacacaaattagccaggcatggtggcgggtgcctgtagtcccagctacacgggaggctgaggcaggagaatcgtttgaaccggggaggcggaagttgcagcgagcagagattgtgccattgcactccagcccgggcaacagtgtgagactttgtctcaaaaacaaataaataaataaatattagccaggcgcacacctataatcccagccactcaggaggctaaggcacaagaatcgcttgagcctgggaggcagaggttgcagtgagcagagatcgcgccactgcactccaccctgggcaacagagtgagactgtgtctcaaaaaaaaaaacccaaaaaaagcaaggttatatattgaccagttgattaaaatgttgtgatcagaggcttgaaggaatgtaattctgtatttcccttaggagcaacaatccactattcactaattcagtgtttgtggtgaatttattgaatgtatagaacataaccaccacaaataacaagaatcaactgtttactgtattctatttatgtaaccatttcttccactggaacagaagttggcaaactaggcccacaggccaaattcaatccaccatctgtctttgtaaataaagttttaatggaatacagtcatgctcattcatttacatattgtccatggctactttggtggtacaacagtaaaggtgagtggtggcaacaaagaacatatgccctataaagtaatttactatctggcccttcatagaaaaagtttgctgacctatacactagactacacaatcagagaaagtaacaatagtgtattcatctttacaatcctagcacaaaactggcacaacagaacaggtaaactttagtctacttaagcactgagcccagaacatggtcttctactccaaaaactcaggggcaactgcattaaattctccagacctgaacaagtcctgaaaaaagacattatgcaaataaataaaatagataatgatatgtaacagaaggaagaagagcaaaaggagagagaacaaggtaaacaaaatcatttgttgggtgaagatagagaaaaaggaaaacagacagacacgtattacattctatttggataacagagattaggagcttctatggtacagtccagactgaaccacaaaacattcaaagaggccaaggagaaggaaggtttgacaagagcttggccaaatatacaatggcatttctcttgtctaaagacattatttgctacaatcagcaccaagcatgttgcaggaatagtcacagtggcttggagaaaatgctggcaatggtaaaccaaatcattccacggcaggaagactcactcaagtttcagagacaaacacctattggccacatgcagtggctcagacctgtattcctaacactttggaaggctgaggtgggaggactgcttgagcctaggagtttgagaccatcccaggcaacatagcaagaccttatctccacatatttagcaaagcataatggatggaataagcataaaaaagcatgggcaaaaaaaaaaaaaaaaataggcgtgagcataaaaaaggtagaaacctaattatgtaggttcctatctttttaattatgtcactgaggaagtgttttaagggttgtgctccttcctacatatataaagaatacgagccgggcatggtggctgacgcctgtcatcccagcactttggcaggccaaggtgggtggatcacttgaggtcaggagttcaataccagcctggccaacatggtgaaaccccatctctactaacaatacaaaaatcagctgggcatggtggtgcgtgcctgtaatcccagtcactcaggaggctgaggctggaagatcacttgaactcaggaggtggcggctgcagtgagctgagatcacgccgctgcactccagcctgggagacagagcgagactctgtcacaaaacaaaacaaaattaaaataagtctatcagtctatcatctatcaaccactcccaatcctatatgctttcttccccagcagacagacatgtattacattctattcaagatgctgataacaaaacaatcagatctaaaaaatcctcagcagttctatcagagacccttgcttttcagtgtgaaaatgatttctgatgctgtaatttaatatccttaactccctgactgtcagcaacaacccagttgacaagcagtaccccgtttctaaagggagacgaagaacagcagaagatatagccactaaataacaaatgcccagaaccctggcaacgtggatttggagggtcctggctggcaggtggaagagttgaaatgtgaatctcaataggatgctacttgcagttgaggctggcaatccctccccaggctggatgttcaacccaaaccacatctcaagactaaaaaccaacaacccacaagctaacctcctgcaaccattcagagagagaaagatccaaagcaaatgcttggcagagaacagactagttgggatgttaccactgttactaacaaccacctgaagccaaactttctgtttactcatggatctaaatttaagcagtctgtattagaaattctctaggagttgtcaaaggaacaattccaattaaggctaatcacccagttctgctataatgttcattttgaaaatgagaatttgtttcattgccataaatacataaacgaacaatttgggcataacacaaactttgcctttccttatgtgtgattttgtttacaagaaacaccaggtaacacagagaactgcatccagttgaatcaagctgcacaggaatacacaaagcatacacacgcacacaccccaaacatctacagctaccccagttcaccacaggatcatgttaggagccaggcctatccacatctgctgttacaactgtccagcaaacgttttttttttgtttttgagttttgctcgttgcccaggctggagtgcaatggtgcgatcttggctcactacaacttccattttccaggttcaagtgattctcccgcctcagcctccagagtagctgggattacaggcatacgtcatcacacccagcttattttttgtgtttttagtagagacagggtttcactatgttggtcaggcttgtctcgaacttccaacctcaggtgatccacccacctcggtctcccaaagtgctgggattacaggcgtaagccactgcacctggcctctgtccatcaaattttaagtaaccctccttctaccacttcacagtaactcacaagccgtaacccttcccaagtccacttccacatgccaactgtatgtctttttgtttttttgagatggagtttccctcttattgtccaggctggagtgcaatggcacaatctcggctcaccgcaacctccacctcccgggttcaagtgattctcctgcctcagcctcttgagtagctgggattacaggcatgcgccaccacgcctggctaattttgtatttttagtagagatggggtttctccatgttagtcagcctggtctcgaactcccaacctcaagtgatccgcctgcctcagcctcccaaagtgttgggattacaggcatgagccactgcgcccggcctactttatgtctttttcaaggtaaagtgctatgtttaatgtagtatttacacatttatttatttatttatttatttatttatttattttttattttttttttttttgagacagagtctcgctgtcacccaggctggagtgcagtggcgcgatctcggctcactgcaagctccgcctcccgggttcacgccattctcctgcctcagcctcccgagtagctgggactacaggtgcctgccaccatgcccggctaactttttgtatttttagtagagacgaggtttcaccgtgttagccaggatggtctcgatctcctgacctcgtgatccgcccgcgttggcctcctaaagagctgggattacaggcgtaagcaccacgcccggccatatttacgtatttcttaaccatttcacatgtataaaattgtacaacagttttaaatcaggctcctatctttttcactatgtcactgagaaagtttttgaggtttgtgctcctaactccattttctgcataagccctgtgtggtttttattgcatgattttgcacagcacagcaatttttaggaatgtatatattgcattatagcaggaataatttatgttcaaataataattttaaaaagtaagttgcagattgttatacatagtactatcctcctttttgttaaaaaatgtatttcagccaggcttggtggctcacacctataatccaaacattttgtgaggcaaaggtgggaggatcacttgagcctaaaagtttgagaccagcctaagcaacataaggaaatcccatctctacaaaacattcttaaaaaattagccaggcatggtggcgcatgcttgcagtcccagctactcagaagactaaggcaggaggatcacttgagcccaggaaatagaggctccagtgggccgtgaccatgccaccgcaccccagcctgggaaacagagggagatcctatctctcaaaaaaaaattttataatgcatttcatgtttttacaggtatgtgcatacacgtatacacttataaatgcttagaaaaaggtctggaaggacatcaatcagttaatagtgatgtctccgaaggaaagaatacaagtgactgccactttatatatacttttttttttttttttgagacaaagtctccctctgtcgcccaggctggagtgcaatggtgcaatcttggctcactgcaacctccgcctcccgggttcaagcgattctcttgcctcagcctcccgagtagctgggattacaggcagacaccactatgcccaggtaacttttttgtatttttagtacagatggggtttcaccatgttggccaggctggtctcaaactcctgacctcaggtgattggcccgcttcggcctcccaaagtgctggcattacaagcgtgagccaccgtacccagcctaaactatatatacattactgtttaatgttgagacaatgaattgttattagttatgcaacttgaaaagttccttttaaaacaaaataaatttgttccagtactggaagtattggaacgagtgatcattatagaaatccaattatatcatccctctgcttaaaatccttagtacctaaatgactaatgtttgacgtgacagacattctaaataccgatttgatcattacacattctgtgcacgtataaaaatatcacatgtagcccataaatatgtacaattattatatatcaatttttaaacatgaccaacacaactccaaaaaaattaaaagccctcaatacctgacagccaaacttcaaaatatttatgaaggacctggcccctgctatcttctctagcctcatccctcgctgcccttcccctcattcgcgtatcaactaagatttatttagaatcttccatatgcagacactggggacaaagaagtgaacacactagatatgactctactctcacagggccttcaatctagcaagggaaagatctgcacaaaactacacttaaaagcacttaaaccagaaatgtggttattacaaaggcgaaatggccagtctcagggatcaggaaacgcttccttgaaaacgtgacatttaggctgagacctgaagggtaagaaagaaagtgactgataaaggcagaaataccagtgagaggtaagagcggtgcgggcagagagatgaacaacagccaggagccagaaaagagcttggatccttcaaggaagaagccagtgtggctggaatacagtaacaaaggaagaaaagtatgaaaagtgtaagatttgaagtagcaggagccagatcatgaggagcctagtggactatgtcgaggattttagacctgattgtaagagcacacagaaataactaaacactttcaagaaggcagtggcatgatcagaaatggatatttggaagttcattcatttgggttactgtctaaaatgaaaggccagaagaggaccaggaataaatctgaaaagaccattatgaacttctttccatagtatatggattactgaaatggtgatagcttgaactacgatggcagcaatgagaaaggagagaagtggatggcttcaagttacgattaggaggtggactcaacagtatccacctcctaataccaggtggtactgactggatgtggggacagaggaaaggaacatgtcaagcacgactccagtcgctcacaggagaacttctcacactctagactccagccatactgaactactcgcagttcctgaagcctccatgcctcatccacattttcatgcctccaagtagaaatgcctttacgacatctttaagctgcaaaatgcggcctcgccccagccttccctaaccatgactggattaggtgttccaactgcatgctcccacggcctctcatgcttgcctttatcacagtacttaccacacggaactataatgacacacctatgtcttcctcacgtgaccaagtgctctttgaggttaaaaatcatttttggttattttaatttctctatcctcaatgcttacttcttatcaatgtgtgtgttccaaggaacagagaaagcaagctaagctcttgggacctactgtgagagaaaaaaaagaatataggaagctaacttgggcctaagaaagcaggtaaaaatggcagtgtggtttcctggatagataaatgaaaagttatgaaactgcagatttctttttcttttttttttgagacaaagtctggcttctttgcccaggctggagtgcagtggcacgatctcggctcactgcaacctccgcctcccgggttcaagcaactctcctgcctcagcctcccgagtagctgggattacaggagtgcgctgccacgcccagctaatttttttgcatttttagtagagacagggtttcaccatgttggccaggctggtctcgaactcctgaccttgtgatctgctcgcctcggcctcctaaagtgctgggattacaggcgtaagccaccgcgtcaggccagaaactgcagatttcttcgagggctggtagcctaaaatgaaaagctcaaactcaaagatttaaatttaaagaaaattaagggtaatagttacccaaggatgatgtacaaactaaaaatatatagtttcatcaatagtttagaaaacaaattaccacgttgtagtctacctacaagaatttaaagtttttaccaaaaatatattcatctattatttgtataattagaaataaaatgggacagacatgatacacctcatgcctgtaatcccagatctttgggaggccacgggaggactgcttgaggccaggagtttgagaccagcctgcgcaacagggcaagtctccatcgctacaaaaaattagctgggtgtggtggcatgtgcctgtagtcctagcaactcaggaggctgaggcaggaaaatcactggaactcaggatttcgatcgcatcactgcactctggcctgagcaacagagaccgaccctgtttttgattgtattcatttattttttggaaggcagagtctcactcatcactcaggctgcagtgcagtggtgcagccttgacgctcttgggctcattcttgacttttttgagacagggtcttgctctggcacctacgctggatcatagctcatgacatccttgaactcctggactcaagcaatcctcctgcctcagactcctgagtagctagaactagaggcccgcatcaccatgcccagccaattttgaaaatttttttacagagacagaagcctcgttttgttgaccaggctggtactgaattcctaggctccagcgaacctcctgccttggcctcccaaagtgctgggattacagatgggagccaccacaccagaccttgactctttcttctccctgagctccccacgttcaaccaagtcttttggattctactgtaataatatgacttgtgtctgttcacttcttcccacctccaaagccatttcttggttcaagtctttttcatatctcacttggaactaccgcagcaccctccttgtctcctatttctagtcttactcttctccaaacattttacaaagcggccagggtttatttctgaagagcagatgttattcccctatttaaagcatccaatagcttcctactattttcaggataaaggtcaaataatttatcatatgacccttcaacatctagccccagcttacaccacccactgggtgaattttacccttaaggcgcaacgaaccagccactgcagttttccacctaccgtgctctctctcccccagccagcctcagccctttgcatatgctatttcctttgcctgggaatcactttaccacctccctttccttctcaagctaactcctacttgttctttatacttcaattgaccaatggctgctttggtcccatggctatgtgctctcatatactgggtgtgcaccccaaaaacagaagtaattacaatgttaagtctcttgcgtcctccactagaatgcactgagacagcaagagatcttgttcactgttatctttagtgactggcacactgtcgataattacttactgagtcaatgaagaggagaaatcttctaaacaagcctgtgatttttctactgtcatttctcctggcttaaaggaaaaagtccccgcccaagagttataagaggatatcccatagaaagcccatcacaaatcagactaactaacctatccatgctactttagttcattctcggaatataaggtcaaccaagaggaaaagataagtacaaaatcccacatagaatcctaaagcatcatgttgatgacgctgaacaaaaagcagcaaaaaaaaaaaaaaaaaaaaaaaaattctaatcctacttttactaaattctgcagtgacacatagtggtgagagagggaagtacataataaagataaaggaagcgtacatgagaagggaaaagaccatcagggagcctcaagtggtttgtcttccttgcaatcagtgggaagtatctgtgcctcacagctgtatgaaccagggcacccaggcttactgagctagtttggctcattgcatcattctcaggaacttacatcactgggactcaggctgcccagcccattctcttgctcagaatccttcccagactcagtgccctgggaagaccgtggatgggatggatgaatccagatctccaggcgagtggtgtcatctccaacatgccggaaagtagacttctttcctttccgccactggtcagggctcaggtcaaattcctcatgttgcttcttttccatctgttctgcctatataacatacaaacacattagctcatggcctggtgtggtggctcacgcctgtaatcccagcacttagagatgcggaggcaggcggatcacttgaggtcaggagtttgagaccagcctgaccaacatagtgaaaccctgtctctactaaaaatacaaaattagctgggtgtggtggcgcatatctgtaatcctagctactcgggaggctgaggcatgagaatcacttaaatccgggaggcagaggttgcagtgagccaagatcgcatcactgcactccagtctgggcaacaagagcgaaactctgtctcaaaaacaaaaaacacacatgagctcagactttcctgagactcagcttacaaagagaaaagcctcacctcaccggtatttatttgacaataaaaatactgtaccacagtcccaaagtagcagagtgtcatctgctttgtttcatatagttattaattctgtagactgaaggctgtagagcacgtacatgtacatccaagggcccctgaaagctctcctgaagatcacagttttgttctgcacaggggctgaccaactacccaccagcacagtctgatgggaccatttaaggacactatgagtcattccccgaggacacacagacactgagcaataactgcaccttggataaacctcactggctacgatcctgccggtgcgcagagctagggcacaccaacactcagggaaatgcactattcgaggaaggaagggttctgccacatccccactcaccttccgcttggtctcttcaaacaagctcatgagactctccttggcagtcaggatagggttgctggcagctaaactgcgcatatagtaatagacagcgtcaagcttcctcctctgtggaaagaggccagagacattcagtcaaccaattctcgtcctaactccagcaagaggcagctgactcaggaaaccctactatctctcccagcctgtctcccaaactgagaggaatcccaacaacaaaatcagaaatgctatccacaggagaagccattgcaattacatcacagatctcttcttgcacagtattatatcttacatgcagaggtgctccaagaaccaagtactcataaggagagaaaggaataaacaggctcttaaaatataaacagaaattacatcttgttcttagaaaaagcatgatgttcaattcactttatatttcctgttcttatcagagagtcagtatgctataatgaaatcacgaaattacaagccagacagaccttggtccaaatactggctaatccaggagttgactcggaaactttggacaaaagactccaagattattacattattatgtaataatcttcctgagttcctatatcctcaacattacaatgggagtaataatacccaatggaggagtatcctcaggtttacaaagtgttgtccactgtctcacacttaactgtacttaatcaatgatgttgccattgttattgataattttttaaaataaataagtagctgagttgaacattttatggatattattcaagaaattcagcaagtctatttataagcaattaatagggaaaagaagaagtaaagaaaaaggaagtgggtcagaaagaaggaaaaaggaaaacattgaaacaaaggcagaaagaatatccaaaaggctttctcactttttctccaacttcatgtacattttcaatgttttccataactgtttcaaaatacatttaaaatgctagcttctctctctccccagcgtctacccattcttcaaaactcctatcttatattcacctggcatggctagaggtgcaggttctaaggtcagtgcctgagtctgaattcggtcttgcatttattaggtatgacacagcacgttaacctagagaggtttccttatttgcaaaatggaaatgtttacaacatatggctcccaaaaagattaaaattatataatgcatatagtttaacagaatatttggcacaccattacagttacttggtagctatttttattattattccaatccatactaatttctatctacactactcacctgatttgagactgtattatattaattctataaaatattttttcatatgaaaaaatttccaaaacagagatacaacttacaatcggtatctattgttatgtcttattttaatttgcagcatttttcttagtggaacagaagataatggtgcatctaacaatcaattacatatttatcaagtctaatttgcatcactgtctatacagctcacttgttttctcaacacattttttttttcagggaagaaagcaagtcaatattttatcattcctggcacctagaaaagcactactgtacacgtgttgtgttctcaataaatacctgagattcactgattggaagagacagaatgactgactgattggaattggcagaaaagttgggaaaatgttgctaacagacaactaagatgagacagacagaaaaaagagggatagaggaaaagaacttgaagaaagtgcgaatctaggtcagaggtctgtgaaaaagaaaatttaattcaaatgacaaaaagccattgagggaattcagcacagttgcaacatacaagatcaacacacgaaattcagttacatttctatatactagcaatgagcaatctgaaaaaaaagaaattaagaaaacaatttctggctaggcccaatggctcaggcttataatcccagcactttaggaggcagagggaggaggctcacttgaagccaggagttcaggaccagccttggcaacgcagtgagaccctcttttctttttttttttcttttttgagacgaagtctcgctctgtcatccaggctggagtgcagtggcatgatctcagctcactgcaaactccacctcccggatttgagcaattctcccgcctcagcctcccgagtagctgggactacaggtgtgtgctgccacacctggctaatttttatatttttagtagagatggggtttcaccaagttagccaggctggtctggaactcatgacctcaagtgatccgcctgcctcagcctcccaaagtgctgggattacaggggtcagacaccccacctggccaagaccctgtctaaaaaaatagagagaaagacagagaaaaaaaagaaaacaattccttttgcaaaagcatcaaaaagaatgacatacttaggaatacatttaaccaaggaagtgcaaaacttattatacacagggttaaaagaaattaaagaacgaagtaaatgaaaagacaccctgtgttcatgaattagaaggcttaatattttgaagatggcaatacttcccaaagcaatctacagattcagtgcaaccttatcaaaattccaatgattttgcaaaaatgaaaaagctgaccctaaaatccatacataattacaagggacctcaaatggccaaaaaaaaaaaaaaaaaacgaagttaggggactcacatttcccaatttttcttaccacaaacctacagtaactaacacagctgtggtactggcatgaggactgacatataaatcaatggaagaaaactgagagctcagaaaaaacccacatataaagtgactttttacaagggaaccaagaccattcaatgaagaaagagcagtctcttcaacaaatggtgctgagagaatgtaataaccacatgtaaaagaatgaagttggacctttacctcatactatatataaaaattcacctaaaattaatcaaaggcctaaatataagaggtaaaagtctaaaactctaagaagaaaacgtagaggtaaattttccaaaccttggatttggtaatggtttcatagctatgacatcgaaagtgaaaggaacaaaagaaaaaaagataaactggacttcagcaaaattaaaaaacacttgtgcatcgaaagatattctcagcagaatgaaaagacaatccacaaaatggaagaaaatgtttgcaaattatgtatctaataaaggtctagcatccagaatatataaagaactcatacatcttgacaacacaaaacataaaataattttttttttttttttttttttttttgagacagagtctcgctctgtcgctcaggctggagtgcagtggcgtgatcttggctcactgcaagctccgcctctcgggttcacgccattctcctgcctcagccttcccagtagctgggactacaggcgcctgccactgcgcctggctaattttttgtatttttagtagagacggggtttcatcgtggtctcaatctcttgacctcgtgatccgcccgcctcggcctcccaaagtgctgggattacaggcgtgagccactgggcccggctaaaataacaatttttaaatggacaaaggacttgaatagacatttctccaaagatgatatgcaaatgaccaatgtgcatatgaaaaaatgctcatcattagggaaacataaattaaaaccataatgtgatatcacctcaccaccactacgatggctactatcagaaatgcagaaaataacaagtgttggcaaggaagtggagaaatcagaagccttgcatgctgttggttggaatgtaaaatggtgtagctgctatggaaaacaatatggttgttctaaaaacctaaaatcagaattaccaaatgatctagtaattcgttttctgggtatgtacccagaagaattggaagcagggtcttgaagagattttatttgaacacccatgttcactgtggcattattcacaatagccaacagatggaagcaatccaagtatccatcaatgggtgaacgtacatataaaatgtggtatatatacacaatgaaatgtaattcaccctccaaaaggaggaaattctgacacatgctacaacatggatgaaccttgaggacctaagctaagtgaaataagccagtcacaagaggacaaatactgtataattccacttatatgaggtacctagagtagccaaattcatagtgacagaaagcagaaggttagttgcagaggttgtgggaagagagaagtgggagctgttatttaatagatatggagttccagttttgtaaaatgaaaagcattctggaggttcgttacactacaatatgaatgtacgtaatgctactgaagctacacttaaaaatgggtaagacaggcagggcatggtggctcacgcctgtaatcccagcactttcggaggccaaggtgggtggatcacctgaagtctggagttcgagaccagcctggccaacatggtgaaaccccatctgcattaaaaatacaaaaattagccaggcgtggtggtataagcctgtggtcccagctactcaggaagctgagaaaggagaatcacttgaacccgggaggtggaggttacagtgagccaagatcgtgccactgcactccagcctgggccacagagcgagactccatcacaaaaaaaagaaaaagagcaagacagcccgggagtggtggctcatgcctgtaatcccagcactttgggaggctgaggcaggtggctagcttgaagtcaggagttcaagaccagcctgagcaacatagtgaaaccaaatctctactaaaaatacaaaaaatttagccaagtggggtggcatgcgcctgtggtcccagctacttgggaggctggggtaggaggatcacttgagcctgggaggcagaggttgcagtgagccaagattaggccactgcactccagcctgggtgacagagaccttctctcaattaaaaaaaaaaaaaaagtgggtaagataggcagggctggtggctcacacctgtatcctagcactttgagaggctgaggtgggcagatcacttaggagctcaggagttcaagaccagcctggataacatggcgaaatcccgtctctacaaaaaatacaaaaattagccaggcgtgagcagccaggcgcggtggctcacgcctgtaatcccagcactttgggaggctgaggtgggcggatcacgaggtcaggagattgagaccatcctggctaacacagtgaaaccccgtctctactaaaaatacaaaaaattagccgggtgtggtggagggcgcctgtagtcccagctactcgggaggctgaggcaggagaatggcgtgaacccgggaggtggagctcgcagtgagccgagattgcgccactgcactccagcctgggcaacagagcaagactctgtctcaaaaaaaaaaaaaaaaaaaaaattagccagctgtggtggcgggcacctgtagttgcatctatttggggggctgaggcagaagaatagcttgaacctgggaggttgaggctgcagtgagctgaggtcatgccactgtattccagcctgggtgacaaagtgagaccctgcctcaaaaaaagaaaaaaaaaattaagtgactgggagcagtgactcatgcctgtaatctcagcagtttgggaggccaacgcaagaggatcacttgaggccaggagttccaagacctgcctgggcaacggagtgagatcctgtctatacaaaaaatcaaaatattacctgggtatgatggtgagtgcctgtagtcccagctaatcaggaggctaaggcaggaggatcacttgagcccaggaggtcgagactgcagtgagctatgattgtgtcactgcactccagcctaggtgacagagtgcgatcctatctcttaaatatatatacacacatatatatgtgggtaagaggataaattctatgagtattttacaattaaaattttaaaactgccaggtgcggtggctcacgcatataatcccagtgtgaggctgaggtaggtggatcacttgaggtcacaagttcaagaccagcctggccaacatggtgaaaccccatctctactaaaaatacaaaaaaattagcaggggctggtggtgtgcacctgtaatcccagctaccctggaggctgaggcaggagaatagcttgaacccaggaggcggaggttacagtaagccgagactactgcagcgctgcactccggcctgcgcaacaaagcgaggctccatctcaaaaaaaaataattattattttatacatatatatatatatatatatatatgtaattaaaatttttctcaatgagcaatgaaatagatatttctcccaatagcaaatcagcacatgaaaagatgcacatcattagttgctaggagaatccaataaaaaaccacaatgagttatcacttaatactcactaggtttgtggataccaacaaagtgattctaaagtttacatgggaaggcaaaagatccagaatagccaatacaatactgaaaaacaaaggtggaagactgacactactgaacttcaagacataaataaagttacaggaaccaagacagtgtggtactgaccaaagaacagagaaatagatgaacagagaggccagaaataaacttatgcaaatatagtcagctggtctttgacaaaggagcaaaggcaattcgatggtaaaaggacagtcatttcaacaaatggtgctagaacaactgtatatccacctgcatcaataaatctatacacgagccttacacttttcacaaaaattaactcaaaatgtattacagacttaaatgtaaaacataaaactatacaactgctagaaaataacacaacattaagctagccgtgggtgtgaagacaacttcttaaataaaacaccagaagcataacccatgaaagaaataactggtaagatggatttcactaaaatttaaaacttctgctctgcaaaagacactgctgaagaatgtgaagacaagccacagtctggaagaaaatagatgcaaatcacacacctgataaaggacttgtaaccaaaatatataaagaactcttaaataagggaaaaaactcaattttaaaaatgggcaaaaaagtagtgggggggccaaaagatctgaacacctcactgaataagatatgtagatggcaagcatatgaaaagacgctcaacatcgtgtgtcattagagaactgcaaaaagtcatacattatatgatcccatttatgtgagacatccagaacaggtaaagatacagagacagaaatcagactagtggttgtcaggggctgaggggaggcagggatggaaagcgtaagtatcaggtctcctttggggtgatgaaaatgttctgacacatggccaggtgcggtggctcacgcctgtaatcccagcactttgggaggccgaggcgggcggatcacgaggtcaggaggtcgagaccatcctggctaacacaatgaaaccccgtctctactaaaaatataaaaaactagccgggcgtggtggcgggcgcctgtagtcccagctactcgggaggctgaggcaggagaatggcgtgaacccgggaggcggagcttgccgtgagccgagatcgcgccactgcactccagcctgagcgacagagcgagactccgtctcagaaaaaaaaaaaaaggaaaatgttctgacactagataaaggtgatggttaattgtactttctaattaacagttcattcaacgattacaaagaaggaatcaggaaaagacggatatagagaaaaagggaagaaaaaatagtgctgcaaagagggcgggaaaaaaaatcccataaacccatcacggagaatgagacagaggcaaaaaccggagagagatcaaccaattctgaaagaagtgtttcagtaaaccacattacttaatcaactatttcaatccataattattaagaattttcttgggaggctgaggctggaggatcacttcggcccaggtgttttgaggccagcctgggcaacaaagcaataccccgtctctacagaaaaatacttgtcatccgggtgcagcagtgtgtgcctgcagtcccagttacttgggaggctgaggcaggaggatcacctaagccagtagtttgcgtcactgcactccagcctgggtgacagagcaagaccctgcctctcttaaaaaaaaaaaaaaaaaaagagagagacaattttctccttgctaatgagcatcttatttgtttcttacgatggaacctctggtacctaccactggtccccactttcccccttgaattgagctttctccctaggagctgtctcagctcccaaggcccgcttctccattacagacatatttagagcacagtgattagacctagggaggtacaacctgctgcttactgtgcttctgctaaggaggcacctcagataaaaagttaaaagaagtaacagggtctagggaaaggaagcaaagatctgactacttagaggtaggtgaaaactttaagggagagaagtaagccttatttttcgtctagaatgagttgcctagttcaacagaaagggaagagaatcaagacaaaattcagagtggcagctctggtcagaaacaaagaatggtgtttagctggagcatgagcattccctcaggaatttgagtgcagtggtaagtggagagatgaagtacagagttaagtgaagtgaggaatccctgacaacttaattctgagagtaaccgtaacaaaaggagtttgaggggatattctttgggctacagtgatgagatgaaatgaagctccaggaactgatattatcaaactccatattgtaagatacttcctgcaaagcacttttcccctgtccacaggatttcttaccgtatacactgccagcaaagccaactggttataggggcgcccattcttgggagcaatgtgctgggccttcaggtaccaactagaacagaaaaaacagtaagaaaatgctagttccagattagctttttcccaattcatcctgatagccctaatacttaaaacataaggtagagtgttagatgtaaccctggaggggtaaggcatgactacagggaccaatagggacacctgtacaacacccacatggcctactgctcttagtaaggcttagcttagagccacatagggaagagaaataacgaagcagaggtaaaagtacctgcgtgctttcccataattcgctgtatcactggcttgctcccggtacctagcaatatctccttggcatatcatgcatcgctgggcactgatcaaggcatattttaccttcaggaaaaacaaccagttagtagaaaagccaagaaacactaacttcaaccctcaaaggacagggatggggtgaaaatgacaatgtagcactcgtaaggcactagcggtcctcaacaaagtataaagtttttagcctaaacctgactaccaaaaaaacacaacaaactataaagttttcagcctaaacctgactaccaaaaaaacagtcagcagtgtgatacaaaatttagtgagaaagagagagggtgattcttgagtcccaggcaaatgaaagaaaatattttgatattagtagtcaggagatctgactctacggaatagtgttggatctcaaggaagtctttgagatgctctgggactcagtttcttcacctgaatgtaaaagtaactactctatagggtaactggaggaaataaatgtaaaaatattttataaactataaagagacaaacaaatatgaaaacaattgtttactctattcttttttttcccccctaataatttctgagacagcgtctcactctgttgcccaggctggagtgtagtggcgtgatctcagctcactgcaacctccacctcctgagctcaagtgattctcgtgcctcagcctcctgagtaactgggatgataggcatgcgccaccatgcctggctaatttttttatttttaatagagacagggtttcgccatgttgcccaggctggtctcaaactcctggcctcaagtgatccatgtgcctgcctcagcatcccaaagtgctgggattacaggcgtgagccatcacgcccacccactttttttgccatcattatagtctttcttcaaactgttaacatcactgaattgtaccacggcattacattaccttcacctaaaacaatggatcgtcctttatcacacattaacaacgtgccacacactgtgcaggactatgtgttttctcactgattggcttggcatctgtcactcagaaaacagagtaaaccaatcccaaggcatgtgccccccaaaatatctccctagggaacaccacctcacagcacacaatataattccactccactccacacaaaagaaattaacatatcactgaataaagaacaaagcttcattgagaagaagatactgacccctcaggaaggcacactcactaagcgaaatagctactgcacattaacctcctacctagcacataactcaaatttgtacctcagcaaagttataatgactacatatcacataccccaagtcctaactgttccacagattctatgaatgaacatccccaaaggtgttaagaatcctctgtatttaactgataaagcacaaagagaactgattatgcctccatactacatccactttgtcatgttggtaagagacaaaaacaaaacaaaacaaaacaaattctttcaaaggctctccgtcagcctcagcatgaagtcctggacgattgagcctctgcttacctcatcagcaccatattcccggtcactttctgtacctcagtcagaccagactccaaagttcccctaacacaccacggtgttctccacttcagggcctttaagtatattgtcctcttcccctaaaatgttcctctccttgcatctacacatacaccttcacctggctgaagctttcggccttcagcgttagtttaactatgattttctcagtctcacaggattctttaaaactaggttaaccctttacagtatacacccccaacatccttggcaaaagtcactccatcagcaattactcatccaaagtctgtactcaccagcaatcaaacactaaactccaagaaacaggagcacggttttttttcaatctgcactgaattgcctctgcctaaaataccaccaagcatgtaagaggaactcaataaacacttttttttttttttgagatagagtctcactttgttgcccaggctagagtgcaataacgcagtcttagctcactgcaaccactgccttctggtttttaagcgattctcctgtctcagcctcctgagtagctgggattacaggcatgcaccaccacacccagctaatttttgtatttttagtagagagggggtttcgccatgttgggccaggctggtctcaaactcctgacctcaggtgatctgcctgccttggcctcccaaagggctgggattaaagagtgagccactgcgcccagccaaaaacatctgtccatcagtaagaaagtgtgtatgtagtagaaggagcaaaaaggcaagaggaagcctctgctccataaatcacgctgctctccctaatgcatctctaactgcttcctaaatatgctcaactttccaatcttaaaacaaaaactggccaggcgtggtacagacaaaaaaaacgaaaaacaaagaacaaaaaaccttctcttagaaccctatgttcttttagctgtcttccctccttgtcttcgcagccaagatgcttaaaagaatggtctatattactctctggcaatctctactgctttatctctcttcactacaatccggcttccagtttccccaactaaattaactcttgataagttcatccaatccaacggacactttttagtaatcttaacatttgacagctccattgcacttgacaattttacctacccccaccttgaaatgtaacccccgtttctggccagccttcccagtaccccaacttttgcttcaaccaccacctgtatcatgatgactcatgaatctatatcaccagcccagctttctcctgacctccagagagaccacaatattcacttgttcactttcaagttcctgtaacacacacacctccacatcagcatatccaaacctgaaccaatctctttcctttgcagccactcccctggactaccagctgggagatgattcagactcttcatgcctccaatctcatccctcacaccaaatcagtcaacaattccattctatttcctttctttctttccaatctgtcttctctttcccatctccacgacctctatcttagttcagacctacaacctgactcctctatctccactcttgcccagctcccattcaaactcaccaatttgcccaagtgactggttctaagaacaaatctaccttatccatttactaaaaaatcaattaatggttccccagtgctttcagaatgaagtccaaactcttcggcatagcatatgagagtttatgacctagtcgcttcccactttgttagcttttccacctacaatagccccctccacactacaaacaccagcatactgaagttcttgcactttcccaacaatgcctggttctcttttgctggaccctctatctaaactgcccctcccaccttcaaactcctagtcatgtttcaaaactcagcttgacaatctccaagaagccttccttggccccaccaggctacgttagattcacttctccctatggcccttcaacactctatatcaggggtccccagcccccaggccgcggactggtaccagtctctggtctgagcggtgggcaggcaagcatcaccacctgaaccctaactcctgtcagatcagcagcggtattagttctcacaggtgcgcaaaccctattgtgaactaagcatgcgagggacctaggctatgcactcctcatgagaatctaatgccccaacatctccgtccatggaaaaactgtcttccatgaaactagtccccggtgccaaaaaggctagggactggccaggcccggtggctcatgcctgcaatcccagcactttgggaggctgaggcgggtggctcaccgaaggtcagaagttcgagaccagcctgggcaacatgatgaaacccccgtctctacaaaacatagaaaaattagccaggcttggtggtgggcacctgtaacgccagctactcgggagactgacagaggagaatcccttaaacctgggaggcagaggttgaaggttacagtgagccaagatcaaaccactgcactccagcctgggtgacatgaatgaaactccttctcaaaaaatgaaaaaaaaaaaaaaaagaaagaaagaaagaaaaaaggctggggagcactgctatataccactaccatagtacatatgacattacaattgttggtttaatctatctgtccctgcactgaactgtatcattattttatcctcaacacccagtacagtgtctagcacatacctaacactagataaacgcttacgaaatgaatgaaaatttaagatacataaagaaggtagcttactgtcttgcgtaatggcttgctgcgaatggcaagaccatccatgtagtcttccagtttgaacttgtaagtaacctgcagcttctgaagcaaactatcaaagaagtcactaccctataaaaagaaaaaaagaaatgactgaatcaatctattctaatccaacctatccaccaaaaaccggggcagacaaccctttcacagttctgctgatgttcagacatcctatgaaaagggaggcacgcacaatattcactggccaccaatttgagaacaaggcaaattcacagtcaaagcctccatggttttaaagatatgaacacatgaacacacacacacacacacacacacgctctctccacacaaacacaaacacatacatacacattctcattctctctcttttaggccaaggcattcagaaagctttcaacctcaaaactccaattgccagtaatttatggtcccaaggaagcaactggtgtagggaaggctcagaacccaagaaaagggcagtttttttgtcgatattctgttctaaaacatagtatttcaggtagtaaaaatccatcgtaactacagaatgctgaagcctttatcctgaggacaaaaagatgacagtttacctcatccaagagctccaaaagtctgttccgaatctgttctgggttctcaacattcggatccttgacaagttgcctgaacttctcaatcacctgatagaaagcattcttccacaggatctgatccacattctgattatcagagaactcaatatctaatagaatacagcgctcatatagctgcagcagttcagctctggaataaaatacatgcaacttccagctccaaatacaccacagaaaaagctagactcaagttttgagattcctgcaaattaaccacctcccctggcaggaaataaaaaatgtgaccaggtaggtatactactcactctggtttccattctgcagagcagaatgtcattctaaagatagttgtgtctaggaaaatagtttttccccatatgtcttcacctaaatttaacaactgaaataagatcttcactgcaagttacatgttgttcatttcttggcattctagaaagtctttttccatttcaagattccatgatcccttaaagataattttttcttaaagaaaaagtaggatgcataattatttctaagactagaaatagggccgggcgcggtggctcatgcctgtaatcccagcactttgggaggccgaggcaggcggatcacgaggtcaggagatcgagatcatcctggctaacatggtgaaactccgtctctctaaaaatacaaaaaattagccgggtgtggtggcaggcgcctgtagtcccagctacttgggaggctgaggcaggagaatggtatgaacccaggaggcagagtttgtagtgagccaagatcgtgccactgcactccagcctgggcgacagagcgagactccgtcttaaaaaaaaaaaaaaaaaagactagaaataaaacttctgttctgtttccaactgcccttcccttacaacgtgaaaaggaaataatacccagtggctcagctaaaaagtttctaccttcctcagccatagcaatctatacacctccggctgatccccatttccctccagccagaatagaccacatcatacctgagttgcgccatcttctccaggccctccggactgatgcggtccctggagagcaggttgctgagctgcagttcctggttgtcagccacccggagaagcctgtgcagctcctgttgctgcaggttcctcatgtgctgctctacctcctcgggactcatggtgctggtaggtagagggctacacacatactgtcctgacggagtcgggtagcctgggtagtaaggccctgggtacacaccattcgtagggcccactgggtactgtagagggttatagcccgtatagggatactgggaggcagggcctggtgtccgggggtaataataggggttgtcagagttttgaaacttatagtaagatgcctgagcctggcgtgagtcaccccaagatgtagggctgacttcatcatcagtgtccaagaaatgtagctggggcgtctgagtctttagagcaggtttctgatcaggattgtttgggtcccacaatcggcgtgtggtgcctccacggccccaactccgagatcccttactaccagatccaaacaaaagccgaggtcccaaaggcgcggactctggagaacctgctgaattgacagatagggtggtatgggcaggcaaaatcagaatgccacgaccacgaccccgaagttcttgtttcgggtttttggactcctgcttctcagagcctttgcccccactgctcaagcctttgtcaggctttcctctatccatatcatccctggctgacctcaccatgggagactctttgttcatggcttctgcatcgaaagtgacacgaagagtgcctcgatattctttagcactgtttttctgctcaccctccccacggccagaccagtttctttctaaatgtctcttcctttctgaacttctcctgggtcctaatccatcaggctcatcaattctgtcctcgtctaaggaatcggttgaggacacagacacttgcttcttcagtcgtggcctctccttggtcctatcctgtcggcggcggcgacatccattatccgtcaggccagctccctcagcgctgttgttgctgccagctgagctggtgctgcgcgtgcggtagcgattccttcgtttgtctgagcgggagtagcgctttgcggagcccggcctcccgcgggctgggtcgtcgtgggtttccctcaccccctccccttttcccatcctctttcctttttctccttttgcagcccctactctcccaccacctgggctcttttctatctcagccctgtctggtttattcgcaacttcctccttcgcaacatttcccctacactcatcttcctctactctcagttgttctacctggttgaggacttcttcctcctccacccgactggcggattctttgctaacagtctgcaaacgtcgtccaggctgatagatctgcaggtcgggtttctttgttcttttgataatttttagactacgatcctcttgtccagcagtcctaggaaaggattcttgtccccgattattttctgggtctataggaccattctgctcttggttgttcagttccttgcagacatctttaacgggctgtgtaccattttcaacagcagagcaatctcggtcattaacaatttcatctttgaattcctcactcccagggggttccttgattttgggcttgttccttagccgagaaaggccaggcttatagatttccagatctggacgcctgttatctttgcgcggcctggcctcctttaattccttcatgttttctgttatgtcggggaaagagtttgggagggaaaggtagaagataagaataaagaaggaagataggggaaagactgtcattctggttaagtaacaaaaaaagtcgagcaagaattacatatccaaatgctaatactggtaggcaaagaaggacatttctgtagaagcagaaattctgggtttacaacacttgttcaacaattcacaaggctaaggacctaactgtgttggggctacctacacttgggtaagtgaaatgggggaaacccatctccttatgtgtcatccaagtcatattcagaaatccaagatcccaaactacctcattattgtcagaacaaaagacctctctaaccttttcagcactacactgttctctatctatagagcctgtgaatccacctcagccttttcttccgcctctaactttttcctgggtggctaagttcttttaacataacagcaggaggaagaagtaaaaaaggagaaaaaggagggagggtattataacaattatcagtcctggacatctctggagaaaaaaaatgcaactttagtctttaaacttgaccaggatgattctcttcttcaagataccaattaccaaataacatacctgctggtgaattaaacagcaagcagttcttttcccattcttcaacttcacccatcctcaccaactcactaacagtagctcacagagttaccaaaatactgctcagactatcatactagaatactgacactaactgctactgtgatgatggaattattagaaaaaagttccataagggaactttccctggatgctgatggaaagattgtgacatactctcaaaatgccaacaactgggaactcaagaattaagaataatacaggactttagaaaccactctcggccgggcgcggtgggtcacgcctgtaatcccagcactttgggaggccgtggtgggtggatcacgaggtcaggagatcgagaccatcctggctaacacggtgaaaccccgtctcaacaaaaaatacaaaaaattagccgggcgtggtggtgggcgcctgtagtcccagctactcgggaagctgaggcaggagaatagcgtgaacccaggaggcggagcttgcagtacgcggagatcgcgccagtgcactccagcccagcggacagatacttacttaagtatctggttttttaaaaaagtatctgttaccgttatcaaaagtaaccactaaacattacaatggaaaagtgacagaattcgggagaatattatcaagtacacaaatggaatgctatataaaatcctagcataggccaggtgcagtagctcacgcctataatcccagcactttgggaggctgaggcgggaggactgcttgaggccaggagttcgagatcagcctgggcaacatggcaacaccctgtctctataacgtatacaaaaaatagccaggtgtggtggtgcaggtctgtaattccagctactcggaaggctgaggtgggaggatcacttgagcacaggagggggaggctacagtgagctgagatccctccactgcactccagcctggaagacagagtgagaccctgcctcaaaaaaattggccgggcacggtggctcacgcctgtaatcccagcactttgggaggccaaggcgggcggatcacgaggacaggagtccagaccatcctggccaacacggagaaaccccgtcactacaaaaatacaaaaaattagccaggcgtggtggcacacgcctacagtccaagctactggggaggctgaggtaggagaatggcgtgaacccgggaggcggaggttgcagtgagcagagatcgcgccactgcactccagcctgggcgacagagctagactccgtctcaaaaaataataataacaacaataaaaaagtttttaatcctagtattgctctctaaatataaatggaaacaagcccaaaacaggaatcatatgctccagcaagtacatttactgtttgtaggtgtaaggaaaaggggaagaaaagagactgaggttttggatagtgcttcactattttcataagtttaaaaggtaggttcatgaagtatccacaaagataaagcagtttaacccaagaatagctcaccctcggcagtctgtaacttggtggggggcggggggatggggaaagctattcctactactttctagagcagcgggagaaaatagccttaataatccaattatgttaatcaacaaaaaccaatttcacagactggccgcaaacctagagaaggcacctatcacagctaccattctacacaactctattgcctaacgcaggagaggtgagacacttagaatctttcttactttcctgacgtggctggagacttgaaattaacttgcaaattgagcattctctctaataaaaactgctcccacacatgccagggccaaacccgagtagtctgaggtcccggatccctccagtggcgcagctttcggaagcctgtcttgggggggaaaagttcagcaacgaagtcgcaggctcttaaacctttctccccaattccttctctccgacgttaaagcggtggccggggcaggcccgcggagggcggcctggagagcgatacgcccggggcctccaccagaccccactcctttccgcgtctcccgatgcctgggaatccggggcgggtctgagagggctggggcaaaaggaacagtcaccttcgcggcgagaaagagggtggaggcaggaattcgggccaggctctcccggagctggccaggactggccgagcccgaccccgcactaacccgcgagagaggtagggcagcgagggtccgccgcggccccagcgcctactgctgggggaaggggcgggggctccggagccgagggccgagcggggaggaggcagaggaggaggagagggaggcggggcgggcaggcccggcccaggagctgggcggcgcgactcacctctgctcccggcctgcggggccagagtagccaggatcccgcgcagctccgacgcggagatccgcacacgctccagcccttccgccatcttcgcggctgctgctacagccgtagcggctccgccaccgccgcgcgcagccaggaaaccaccacagacgggcggcgcgcgcgctcgcccacctcccggcctttccccgccccctgccgccctccctttccgaacgacggtggccgcgctgggaggaaaagcgcccgccgccggttccagaggggcgggaccggagcgagagcctgggtggggcgggcgggcgctgcgcgtgcgcagaggtgcggccggggaggcgcgcggaggctggagctggaggcgcggcgccggtgagctgaggtgaggcgaggccgggccgtgccaggccaggcgggcgtttgcggcggtggctgccgttgctgttgtcgtggacaccaaggacactgctagtctgggactcgggttgacagagacacccctcagcctgggctcctctggacaccttaggccaggctctcccgccacaggcccggcctagcgccgcgggccattacttgggaccttgaagatctgctaagagtagttgttactattcccttttttttttagttggagtctcgctctgttggagactcccgggctggagtgcagtggcgcggtctcggctcactgcaacctctgcctcctggattcaagcgattctcctgcctcagcctccctagtagctgggattacaggtgcacgccaccaagcccggctaatttttgtattttttgtagagacggggtttcactaggctggtctcgaactcctgacctcaggtgatccacccgcgtcggcctcccaaagtgctgggattacaggcgtgagccaccgcgcccggccgccccctgacttttaaaaactagatacgatatagttggaatcgtgtggaaggaagtacatcaggaggcatataagtccatttgggacctgtaatcccggcgactcggaacgctgagacgggcggatcgcttgaacccgggaggcggagactgcagtgagccgagatcgcgccactgcactccagcccgggagtctccaacagagcgagactccgcctcaaaaaaaaaaaaaagtcaatttgggaatttctgtgtcactatggattcttgaaaaaaattactgctgtggatctcaggttgactttttaatttcccatctttaaaattgaactataccagaaggctggtacttgaatctttttttggagaactgtacagaggtgaagctcccttccccaaggcctcctgcctccacctgttgcccctccacagccccataggcttttaccccacacccatcacagaatagttaccaattattccttagtctgagccgaagggattgccacaacctctgacagaactccttcagttccttttacgtgacactttgtcaccggaaggttaagcataagaagaaagtcagtagatgatgggtgaaaagatccaacagttcagaagaggaaccatttgagtggtcagagcagaagacagcctttgccaccagatttgagagaaataggaagaagcgttaaaaaataatctgtttcatattgaaatttgagaggccattgcatgatttcttttttcagctggaaaaataatggaaaacaagaaaactttcttaggacaaatggcaccacccatttaatgcaacagtgtcagtgaactgcagattagatatgccaaaagttaaaccagttcaagaaaatttaccagaactcagaaggaaaaggtaatagataaaaactgagagacaaagataggagacatggagaaggggtacaaaaaattaataattaaatacgagttccagaaggggataatacagctgactgcagaagagcaataatcaaatagtagaagaaaatttactacgttggtggaaatttttgaattatcagatttaaagaattcatgaaataccaggtaaaaagaaatgacaagaaagacaaccatatttaagtcagtatcacaatgaaagctgctgagattttttgtttttcgttttttttgagacggagtttcactcttgttgcccaggctggagtgcagtggcacaatcttggctcactgcaacctgcctcctggtttcaagcaattctcttgcctcagcctcctgagtagctggtattacaggcgcccaccaccatgcccagctaattttttgtatttttagtagagatggggtttcaccatgttgaccagtctggtctcgaactcctgacctcaggtgatccacccgcctcaacctcctaaagtgctgggattacaggcgtgagccaccgcgcccagccttgaattcagtttctaaaagtaaaaattgtacaagttggccgggcgcggtggctcacgcctgtaatcccagcactttgggaggccgaggtgggcagattgcctgagctcaggagttcccaaccagcttgggcaagatgaaaccccatctctactaaaatacaaaaaaattagctgggtgtggtggcgggcacctgtagtcccagctacttgggacgctcaggcaggagaactgcttgaacctgggaggcagaggttgcagcgagccgagattgctccactgcactccagcctgggcgacagagtgagactccgtcaaaaaaaaaaattgtacaggtcatatttacttagcacaaagtaataaaactagaagtgaatagccacaaatgaagcaaaacattctaaccatttggaatttttttaaaaacaacaattttaggccaggccccgtggctcatgcctgtaatcccagcactttgggaggccaaggtgggcagatcacttgaggtcaggagttcgagaccagcctggccaacatggcgaaaccccgtctctactaaaaatacaaaaactagccgggcgtggtggtgggtgcctgtaatcccagctacttgggagactgaggcaggagaatcacttgaaccaaggaggtagaggctgcagtgagccgagatcacgccactgcactccagcctgggtgacagatagagactctgtctcaaaaataaaacaaaacaaacactttccacccatggacaccgccaagtctaagtcagagtctcctaaagagctcgtacagctgaagaagctcttcattggagggctgagctttgaaacaaccaatgagagcctgaggagccattctgagcaatggggaacactcgcggactgtgtggtaatgagagatccaaacaccaagcactccaggggctttggatttgccacatatgccactgaggaggaggtggatgcagccacgaatgcaaggccacacaaggtggatggaagagttgtggaaccaaagagagctgtctcaagagaagattctcaaagaccagatgcccacttaactatggaaaagatatttgttggtggcattaacgaagacactgaagaatatcacctaagtgattattttgaacagtatggaaaaactgaagtgattgaaatcatgactgaccaaggcagtggcaagaaaaggggctttgcctttgtaacctttgatgatcatgactccgtggataagactgtcattcagaaataccatactgtgaatggccacaactgtgaaattaggaaaggcctgtcaaagcaagagatggtgagtgcttcatccagccaaagaggtcaaagtacttctggaaactttggtggtggtcgtggaggtggtttcggtaggaatgacaactttggttgtgaaggaaatttcagtggtcatggtggctttggtggcagctgtggtggtggtggatatcgtgcagtggggatggctataatggatttggtaatgatggaagcaattttggaggtggaagctacaatgattttggcaattacaacaattagtcttcaatttttggacccatgaagggaggaaactttggaggcagaagctctggcccctatggtggtgcaggccaatactttaccaaaccacgaaaccaaggtggctatggcggttccagtagcagcagtagctatggcagtggcggaagattttaattaggcaacaaagcttagcatgagaggagagccagcgaagtgacagggaagctacaggttacaacagatttgtgaactaagccaagcacagtggtggcagggcctagctgctacaaagaagatatgttttagacaaatactcatgtgtatgggcaaaaaactcgaagactgtatttgtgactagttgtataacaggttgttttagtttctgttctgtggaaagtgtaaagcattccaacaaagggttttaatgtattttttttttttgcacccaagctgttgattgctaaatgtaatagtctgatcgtgacactgaataaatgtctttttaaaaaaaaaaaacaacaaaaaaaccaccaattttaaataattcatgggtcaaaaaagaaaacaagactaaaatcttggattatttagaaattataataatgaaaatattgcataatggaatccatgatattaaagcacttctcagaggaaaaatcctataagtaaccttatatgctttctttttaaagtgaaaattagtaagctaagcattcaacaaatatagaagacaattaaaggaaaatggcagagtaaacaatcagaaataagggaaaaagagctgtactttaaatagattgaaaagctcattcttcagaaataaagcagatactaatatacacacatttctggcaaaaaataatttttaaaaaagggacatcctcttggatgtttcataaacaattcaaacttagctaatcaaatctgattttcctgtcaaatacttatttcttctcctgttttaaatctcaacaaattgtaccaccatttaagtcaaaacccaggagttactctttttaaagaaaaatttttggctgggcacggtggctcacacctgtaatcccagtactttgggaggccgaggtgggtggatcacaaggtcaagagatcaagactatcctggccaattagctgggcatggtggcacgctcctgtaatctcagctacttgggaggctgaggtaggagaatcacttgaacccaagaggcagaggttgcagtgagccaagatcgcaccactgcactccagcctggtgacagagtgagactccatctcaaaaaaataaaaatattggccgggtgtggtggctcatacctgtaatcccagcactttgggaggctgaggcaggtggatcatctgaggtcaggagttcgagaccagcctgaccaacatggtgaaaccctgtccctactaaatacaaaacattagccaggtgtggtgctacatgcctgtaatcccagctacttgggaggctgaggcaggagaatcgcttgaatccgggaggcggaggttgcagtgagctgagattgccccattgcactccagcctgggcaacaagagcgaaactccatctcaaaataataataataataataatttgtagaggcagggtttccctgtgttgcccaggctggtctcaaactccttgcctctggcaatcttcccaccttggccttccaaagtgttgggattacaggtgtgagccaccaggcctggcccaggatttattcttcacacttctctcccccattcaatccactatcaggatatgtctcttctgttcctataatgaacatgtatggaatcatctccccagcattctcccctttattttcacttggaaaatgccccttactcccactcaaaagtacttttttcttttctttgttttctttcctgtgtcactcctttattttgctattttcccctcaggtgcagagaattgagccagtcatactcgtttattcacactgtcattaacaagccctttctcattttatcttttctcttcattccagttcccactaatgttcctttcctccctccttaggtattcactctaatgtgtttgatatatgtctttgaatatacatgtatctttgaataatatgtaatgttttatgtatgtatgtgttttaaatgtacctaattgatactgtgttacagatctcattctgtttctttttcatgtttatgtaaatacttctgactattgcacactgttatcttcagtgacctcataccctggccactggtcctgggccaagatgggccagagtccttacccagaatttttttaactgaaactgagaaagaaaattccccttcagtgtggaagccataaaatgtaaaacatacgagctgtcagcagccacgtgtcagttggttccatatggaaccaactcgcctgtgtgaaaaagaagccgacgtgcagaaagcagcagaggtgagagactaagagtctgggaagctgtcaaatctctggttccagtagttcctgaagctccatattcctccccttaccatggtttgttcatttcttcatggattccatgagctagtaaatctcaacacctccaccttgtgcctactaaggtagtacaaattgaggttctatcacttgcaactaagaggactaactgtttacaacctccaaaatatatcttatttttgatagtgggttttttgtattctgggttttgttgttgagagacagggtctacatgtaggaatggaatcggtagatcataggatgattctatgttcaattttttgaggaagcaccatactgtttactgtagaattaccactacaggcgcctgccacctgcacggctaatttttgtatttttggtagagatagggtttcaacgtgttgcccaggctggtcttaaattcctgagctcaagcagtccgcccacctaaagtgctgggattacaggtatgagccactgcatcctgccaagggggcataattgacatttattcataaaaatattgagacttcaggcctggcatggttttttgggatttttggttgttgttttttttttgagacagagtctcactctgtcgcccaggctggagtgcagtggaacattctcggcttactgcaacctttgccttccaggttcaagcgatttttctgcctcagcctccctagtagctgggactacaggcaaatgccactactcctggctaatttttttgtttgtttgtttgagacagagtcttgctctgtcacccaggctggagtgcagtggcatgatcttggctcactgcaaactccgcctcccgggttcatgccattctcctgcctcagcctcccgagtagctgggactacaggtgcccgccaccatgcccggctaattttttgtatttttagtagagacagggtttcaccatgttagccaggatggtctcgatctcctgaccttgtgatcttcccacctcagcctcccaaagtgctgggattacaggcgtgacccaccacgcccggccaatttttgtttttttaatggagacgggattttactatgttagtcagtctggtctcaaactcctgaactcctgatctcaagtgatccacttgctttggcctccaaaagtgctgggattacaggcaagagccaccacgcccagccaactattttttgttctcttgtttttttgtttttaagagacagggtcttgctcttgcagtggtacaataactcactgcagccttgaactcctgggtttaagcaatcctcctgccactgtgcccagccgagggggcataattgacattaaaaaatattgagttttcgggcccgtcatggtggctcacgcctgtaatcccagcactttgggaggccaaggtgggtggatcacttgagctcagaaggtcaagaccagcctgggcaacatggcaaaaccttgtctctacaaaaaatacagacgttttttgtatttgtggtggcacagtgcacctgtggtcccagctactcaggaggctgaggtgagaggattgcctgagcctgggaggcagaggttgcagtgagctgagatcatgccaatgcactccagcctggacgacaagagaccccgtctcagtaaataaataatgcctccaattcatttatacatctttacaatggaatttctggcaactttgataaagtaattctagttcacctgaaagaattgatatgtgagaaaagccaatgaattttagagcaatcaagggagaatttattaatacagtatataataggaaaagacattggcagtctggccaatggaacaaaatacaatagccccaaccattcatagaaatttaatttttgataaatagagcatttcagaggaaaaggattctgtcagtaaatggtgtgttaagaaggctgggtgtggtgcctcatgcctgtaatcccagcactttggaaggccaaggcggaaggatcacttgagctcaggggtttgagaccagcctgggcaacacagcaagacttcctctctactaaaataaaaatttaaaaaattagctgggtatggtggtgcacagtcatagtcccaggtacttgggaggctgaggcgggaagatcacttgagctcaagagtttgaagctgcagggagccataattgagccactgtacaccagcctggacaacagagtgagaccttatctaaaaaaaaaaaaaaaagactgagaaaagaacaagtggccaagatacacaaaaaaatgttcaatcactagtaattaatgtaaattaaaactactagacattgccaggcacagtggctcacacctgtaatctcagcactttgggagtctgaggcaggtggatcacgaagtcaggagatcgagaccatcctggctaacacagtgaaaccctgtctctactaaaaatacaaaaaattagcctggcgtggtggcacacaccggtagtcccagctactcgggaggctgaggcaggagaatcacttgaacctgggaggtggaggttgcagtgagccaagatcccaccactgcactccagcctgggcaacagagcaagactccgtctcaaagaaacaacaactactagacataactaaattgacataaaaatgatataggacggatgaaggaaaagaggcatcattccatcaaaactgttgttgggagtacaaattgatgtaatataggacccttctggagatcagtttggcagtgggtatcagatttcttagaaatatgtatgccttttgatacaaaataccatttggtgaaatctaccctaaggactgacggaggtacacaaaaatcttgcaacaaggctattcattacatcattcttacagccaacaacaacaaaaggaaatccaaatgttcatttgagctatgtaaacttaaaattattattttttctttttcaagagatagggtcctgcttatgttgcccaggccacagtacagtggctattcatagacgtgataataacacactcccgggctcaagcaagcctcccgccttagcctcccaagtagccgggactaccagtgtgtgtcactgcccccagctaaattattgtatttttgtaaaagaagtactattaagtcattttaaaagttggataaagccgggcgcagtggctcacgcctgtaatcccagcactttgggaggctgagccaggtggattgcctgaagtcaggagttcgagactagcctggccaacatggtgaaaccctgtctccactaaaaataaaaaaattagctgggtgtggtggcaggcgcctgtaatcccagctactagggaggctagggcaggagaatcgcttgaacctgggaggcagaggttgcagtgagctgagatggcgccaccgcactccagcctggcggcagagcaagactctctcaaaaaaaaaaaaaaagttggataaatgggccgggcgtggtggctcacgcctgtaataccagcactttgggaggccgaggcgggcggatcacctaagatcaggagttcaagaccagcctggccaacatggtgaaaccccgcctctacgaaaaatataaaaattagctgggtgtggtggtgggcgcctgtaatgccagcaactcaggaggttgaggcaggagaattgcttgaacccaggaggcagaggttgcagtgagccacagtcatgccactgcacttcagtctgggtgacagtgaaactccatctcaaaaaaacaacaaaaaaaaaatgttgataaatgtactcacctatgagattcattgatattcataatactgtctgacaaaaaaagaagttaccaaacctaccaaagagttttgtctgcatatgtagttgggcctggaaaggtaaaccactggatagcaactgtctttaggtaggaaggtttcgtggctattttcatgttctttttgtatctctgtattttcagattaactcagttttctaatgaatatagattcttttgtaataaggaaaaatagagaaacttcatatttaactgctacaatagacacagtggaaagtggaagcttaatgtagttattgaaaattatgaaaattgtaaagaaactgagtcaaatgtaggagcaaataaaatgtttgctttaactgttacataatgtatattgagaatgcagaaggagccgggcgcagtgactcacgcctataatcccagcactttgggagtctgaggcaggcggatcacctgaggtcgggagttcgagaccagcctgcacaacatggagaaaccccgtctctattaaaaatacaaaattggccgggtttggtggctcacgcctgtaatcccagcactttgggaggccgaggcaggcggatcacgaggtcaggagattgagactatcctggctaacacggtgaaaccccgtctttactaaaaatacaaaaaattagccaggcatggtggcaggtgcctgtagtcccagctaccagggaggctgaggcaggagaatggcgtgaacccgggaggcggagcttgcagtgagccgagatcgcgccactgcactccagcctgggtgacagagcgagactctgtctcaaaaaaaaaaaaaaaaaaaaattagctgggcatggtggtgcatgcctgtaatctcagctactcgggaggctgaagcaggagaatcgcttgaacctgggatgtggaggttgtggtgagccaggactgcaccagtgcactccagccgggacaacaggagtgaaacaccatctcaaaaaacaaaaaaaaagaaaatgcagagggaaataaagaaaatgaacatagttatttaaatggaatagtctagctattttttctttatcaaataatttgttaaatttttattaaaaattaaaaatttaaatttataaattaaaaataatataaaaattgaatccaattcattcaagtagcttcacaacgatgattaaaagaaaggtggagctgggcacggtggcttacacctgtaatcccagcactttgggaggccgaggcaggcggatcacgaggtcagaagttcaagaccagcctggacaacatggtgaaaccccgtgtctactaaaaatataaaaattagctgggcacgatggcacattcctgtaatcccagctactcgggaggctgaggcaggagaattgcttgacccgggaggcggaggttgcagtgagccgagattgtgccactgcactccagcctgggctacagagcgagactccgtctcaaaaaaaaaaaaaaaaaaaggaagatggagaccagtggcagtgccaacagtgccaagagatgggtggtgtgggtggggagtgggctttagccttctgtaatcaccatcagttacttccctcaaagcttcaccagaaaaacttcgttcagcttttaagtcaactctcttttagggaaattctgacactccaataatggagaatttccacatgacaccacaggccccaggtctattctgttacgtattttcaaaatctcttcaataaacatactgtctcagactttgctttgacccctttcttattcctgggtttcagaaccatgtgtgctcagtattgcatctcctttgctgatgttgaaaaagctcatatcaacattcgagattctatccacctcacaccagtgctaacaagctccattttgaatcaactaacagggcgcaatcttttcttcaaatgtgaactcttccagaaaacaggatcttttaaggtaacaatcctttttctcagtgtatcatgtatgttttcacaccctttcacatatcagtttgattctcctgaccacccaatgagataggcagaagtaaattaatgcctttatacagctggaaaaaaggttacagaaattttcctttcaagtccttgttttacctagcatcatagtgttgataagcaacttttacacagtcataaatccttataattaggataatatatataacttatccgagtaatttttatatatatgtatgtgcatatatataatatatacataaaatacagtcatatgccacataacgtttcagtcaatgacagaccacctatatgatggtggtccttggtcccataaggttataccacacatttactgtacgatttctgtgtttagatacagaaatacttctcattgtgttatagctgcctacagtattcagtacagtaacatgctatacagggtttgcagcctaggagtaataggctgtaacagctggatttgtataagtacactctatggtgcatgcaagatgatgaaattgccaaatcatgcatttctcgaaacatatccccatccttaagcaaagcatgactttattatatataccatcacttactgtccaaactaagacataatttattatccaaactaggacatgtttgggactgaaagaagcaacctgaaatatctaaacagacacctgaactgttgcaggcaaattggaaagtgttatcactctgtatatgacccaagtttaagcattcactgtatcaacttgctacacatggatacattatcaatataaaagatctaagcctgggccacacggcaaaactctgtctacaaaaaatacaaatatatgacaggcgcagtggttcacacttgtaatcccagcactttgggaggctgaggcaggtggatcacctgaggtcaggagttcgacaccagcctgaccaacatgatgaaacgcttttttgttttgttttgttttgttttgagacggagtctcactctgtcccccaggctggagtgcagtggcacgatctcggctcactgtaagctccacctcccaggttcacgccattctcctgcctcagccacccgattacctgggactacaggcgcctgccaccacgcccagctaatttttttttttttttttttgaatttttagtagagacagggtttcaccgtgttagccaggatgttcttgatctgaccttgtgatccgcccgcctctgcctcccaaagtgctgggattactggcatgagtcaccgcacccagccttggtgaaacactttctactaaaaatacaaaatgagcgggacttggtgccaggcacctgtaatcccagctgcttgggaggctgaggcaggagaattgcttgaacccagaaggcagaggttgcagtgagttgagatcacgccattgcactccaccatgggtgatagaggaagactccatctcgggggaaaaaaaaaaaaaaaaaaaaaaggccgggtgcggtggctcacgcctgtaatcccagcactttgggaggctgaggcaggcggataacgaggtcaaaagatcgagaccatcctggctaacacggggaaaccccgtcgctactaaaaatacaaaaaaattagccgggcgtggtggcgggcgcctgcagacccggctactcgagaagctgaggcaggagaatggcgtgaacccgggaggcggagcttgcagtgagccgagatcgcgccactgcactgcagcccgggctacaacagagcgagactaggtctaaaaaaataaaaaaaaaaaatttagccgggcatggtggcaggtgcctataatcccagctacttgggaggctgaggcaggaaaatcacttgaacccggccctgggggtagacgcagtgtggggaggcggacgttgcagtaagccgagatcgtggcactgcactccagccgggataacggagactccatctcaaaaaaataaaaaataaagatgcacatgagatatttaagaggtaaatcgataagatttggtgacagattggatgtgcatgttaaggatagaaaatctagaaaagctccttgctttccaaaacaatgttttaatcaaatatgtgaattcaccatccctctttttcagattcgtggtgctctcaatgccgtcagaagcttggttcctgatgctttagaaaggaagccgaaagctgttgttactcacagcagtggaaaccatggccaggctctcacctatgctgccaaattggaaggtacttgatttctcaaggtactgggtagatcttcagaaaggagtggaaaagtgcccttaatttcagtgagagtgatgatagctgtgggaagtaactttccaaagaaatctctatctgattgcaagcaatatgaacataagttttttttttgtttgttttgtttttttgaagacagaatcttgctgtcacccaggctggagagcggtgacgcgatctcggctcactgtaacctccacctgccgggttcaagcgattctcctgcctcagcctcctgagtagctgggactacaggtgcgcaccaccacgcctggctaattttttctattttacaaatacaaaatactaatttcaccatgttgcccaggctggtctcgaactcctgggctcaagcaatccacccgccttggcctcccaaagtcctaggattacaggcgtgagccaccacacctggctgaacatgtttctttcttttttttttttttttttgagacggagtcttgcactgtcgcccaggctggaatgcagtggcaggatctcggctcactgcaagctccacctcccgggttcacaccattgtcctgcctcagcctgggactacaggagcctgccaccatgcctggctattttttttttttttttttttttttgtatttttagtaaagacagggtttcaccgtgttagccaggatggtctcaatttcctgaccttgtgatccgcctgcctcagcctcccaaagtgctgggattacaggtgtgacccaccgtgcctggccacataagtttctattctaaattctcctgactttttcctctcgttttcctctcccaggaattcctgcttatattgtggtgccccagacagctccagactgtaaaaaacttgcaatacaagcctacggagcgtcaattgtatactgtgaacctagtgatgaggtaaggagagcagtgcttggtaccaccttaacagctttcatttgaccaatggctctttctaccttactggctgctccttctcagcctcctttgtggtttcccctttatttctgttagcatgctcaaccttttctctatctacactcacaagatctcattagtctcatttcttaaattattacctatggtctaacaacaccaactccaacttctctccctttaacagccaacttttatataacagctacctaactttcccacttgatgtcttaaaaggcatctcaaactacagctaaaaccaaactcctgatcttacttccctatattgcttcccttccagtcttcctcatcttagtaaatggcaatttttattcttctagttactcaaaaaaaagttggagtcatctttttttgaaaattttttgttgttgttgttaaagatggactctttctatgttgtgggatccttctgcctcagcctgttgagtagctaggactacaggtgcatgccaccacacctaattcctttattttttgtagacagggtctcactgttgcccaggctggtctcaaactcctggattcaagcagtcctcccaccttggcctcccaaaatgctgggatcacaggcatgacccactgcacacagccaggaatcctctctgataaccctctcataccccacatccaaatctcagtctgctttcaacatatttccataacccaactgcttctgtgtctaccgttagcactctgattcaaaccaacatcaattctcacctatattcaattcagtagccaaactggtctctctgcatccacccttgccacactacaggcttttttgagcaaccagaggtctccatttaataaagtcagaacttgtctcttctttttttttttttttgaggcggagtcttgctctgtcgcccaagctggagtgcagtggtgccatcttggctcactgcaagccccgcctcctgggttccagcgattctcttgcctcagcctcccgagtagctgggactacaggcgcctgccaccatgcccagctaattttttctatttttagtagagacggggtttcactgtgttagccaggatggtctcgatctcctgacctcgtgatccacccacctcggcctcccaaagtgctgggattacaggcgtgagccaccacgcctggccagaacttgtctcttttcaagtctaaatcctctgttggtttcccatctcatacacggtggaaacgagagttcttgcaatcatctaatccctggataaactcaaacattcctatctttctgacctcatctctcatctttttttttttttttttttttttttagacagaatctccccgtctcccaggctggagtgcagcggcacaatctcggctcactgcaacctccgcctcctgggttcaagcgattcttctgcctcagcctcccgagtagctgggactacaggcgcgtgccaccatgcccagctaatttttgattctttagtacagacagggtttcaccatattggccaggctggtctcgaactcctgacctcgtgatctgcccgccttggcctcccaaagtgctgggattacaagtgtgagccaccgtgcctggtccctcatcttctttttatttattttgagacagggtctcactctgtccaacccaggctggagtgcggtagtttcttctcagctccctgcagcctccgcttcctgggttcaagagattctcatgcctcagccaccagagtagctgggattacaggcgcgtgccaccacatctggctaatttttgtatttttagtagagacggggttttgccgtgttggcaaggctggtcttgaactcctgacctgaagtgatctgcccaccttggcctcccagagtgctgggattataggtgtcagccactgcacccagccttgacctcatcttctattatttctcttgcccactctgtgccagccatactaacctttttagctgttcctcagaaaggccaagcactcctactttgtagtctttgcactgttaccccctctctggaatattctagacatccacagcacttgttcagatcttttaaaatgtcactttactagaggctcttcttggctaccctatatgaaataaattccttcattttactccattgcacttagacataccatatatttacttcatccatctctaccatacaatataacgtgcttgagggcagggatattttattaacatatatatctctagtacctgaacaaagtgtgaaaaaagtagatggtcaataaaatgctgaatgaccaaatggaacttgttggggactctattaaatacaaatcaattaagctaaattaatgtactttcagtccagagaaaatgttgcaaaaagagttacagaagaaacagaaggcatcatggtacatcccaaccaggagcctgcagtgatagctggacaagggacaattgccctggaagtgctgaaccaggtaaaatagctgagttcttcctgtttagctactggtaaagctgttgggctatattcaattattttatatgtatacattaaatataaaactgcttacagtttatattttcactaaaggttcctttggtggatgcactggtggtacctgtaggtggaggaggaatgcttgctggaatagcaattacagttaaggtgagcagcttctggaggattccctgcttcaagcagaggatttactttacatcctaaatgttctgtatacacgtgctcaacattctgcacacattaccattccttccccttattcctttgggacttgagatgaaggcccatctctgcctcactactctatttactattattattattttttgagacagattctcgctgttgcccaggctggagtgcagtggcacgatcctggcccactgcagcctccacctcccgggttcaagcgattctcctgtctcagcctcctgagtagctgggattacaggcatgagccaccacaccccgctaatttttttgtattttttttagtagagacagggtttcaccatgttggtcaggctggtcttgaactcctgaccttgcgatccacccgccttggcctcccaaagtgttgggattacaggcgtgagccactgcgcccggcctatttattatttctaatatttttattttttttaagagatggggtcttgctgtgttggccaggttggtctggaactcctgggctcaagcagtccttactttggcctcccaaagtgctaggattacaggtgtgagccaccgcacccagccaactctcttcttaatccatgacaattttacagcacaaaagcagttacaagtgacaccatcatagtcttttccctgaattccatgtcatcaagctactatccataccaaggggctacccttttctcaaattaccaggacaatcagatgtgatccaggcaatggaaggctagtatcagacatataatttatttataaagtgcttgaagatattttcattacatccacaaaagggaaggctcttacttgggcagaaatgtattacttattgtgcctattttctttttttttttgagacggagtctcactctgtcacccaggctggagtgcagtggcacgatcttggctcactgcaagctccacctcccaggttcacgccattctcctgcctctgcctcccgagtagctgggactacaggtgcctgccaccatgcctggctagtttttttttgttttttttttttgtatttttagtagagacggggtttcaccgtgttagccaggatggtcttgatctccctacctcgtgatccgcccacctcggcctcccaaagtgctgggattacaggcgtgagccactgcgccccaccccattttggtgtgatctcagctcactgcaacctacccctcccaagttcaagtgattctcctacctcagcctcttgagtagctgggattacaggggtctgccaccacgcctggctgattttcctatttttagttgacactgcatttcaccaggttggccaggctggtcttgaactcctgacctcagctgatccacccgcctcgggctcccaaagtgttgggattacaggtgtgagccaccacaccaggcccatattttcttttagacatgcaggcaatgttgtggtttgttgttaagatgtcttaatattcctcttcccaggctctgaaacctagtgtgaaggtatatgctgctgaaccctcaaatgcagatgactgctaccagtccaagctgaaggggaaactgatgcccaatctttatcctccagaaaccatagcagatggtgtcaaatccagcattggcttgaacacctggcctattatcagggaccttgtggatgatatcttcactgtcacagaggatgaaattaaggtgaggctccagcaagaaaagaaatagcaaagcatggtgtaacttcttaggcagaagaaacttcccttaggagtagcaagtgacccacgggaacctgactaggtaacttcatgacatgggagggtaccctagatgtattaatgacaaccctcttgacagaagcagagtcagaattaaagaaaagctttgggaagcgtgtgtacacagtgataagaaaattcaaactggacacgtattctcatctgaactttataggtaaaccaactagactcccctttcactaattcctactcccttccatatcaacagtgtgcaacccagctggtgtgggagaggatgaaactactcattgaacctacagctggtgttggagtggctgctgtgctgtctcaacattttcaaactgtttccccagaagtaaagaacatttgtattgtgctcagtggtggaaatgtagacttaacctcctccataacttgggtgaagcaggctgaaaggccagcttcttatcagtctgtttctgtttaatttacagaaaaggaaatggtgggaattcagtgtctttagatactgaagacattttgtttcctagtattgtcaactcttagttatcagattcttaatggagagtggctatttcattaagatttaatagttttttttggactaagtagtggaaaaacttttatacttaactgagacattttgtcaaggctaaaaaaaagtcttgcaaaatggggcagtggactgacaggctgacatagaaaataaactttgcccaatcacaacttgtgcctcccatccctggagtactgactggcaccggtaagacagaatctctttgaatccattactccatgcccccttgaggcactgttgaagaaatctcacttttcagccagggtactggttctggtacatatggatcataagtccatttggggaagactcgtttatacaggttcatcagtactgtgtcttgagattttagcttcccatcaaagctgcatttcatgtggccatgggtacctagaaagacatcagaacaagtcggtcaaattaaaagtagaaaattttaaagcaatgacttccaacccaacagtcatttagcaacactgcagaaatgcagacatggtctcaaatcccgtgtttccttacctaaaggttccttgatatgtcctctccggccccacttcgttctcagttccactggtttaaaccacagcacatcctcttagaatcaaacacattaaagaccaagatgaaacatttacccacaaaatgtaaacccaacctttataccacaaaggcaatcagatcccatcctcctccttcatacccacctctgttgaagaacatgtaacgtactactgccatcttagtaaaaattttgaaaggatgaccactcagaacaactctcttgatgaccattctgtctggatctactgacataagatggcctgtagcaatgaggctgtgcattcctaaaggacaaaagcaaagaagctatttaggaatttacaggccaaagtcttcatttattgcccagtccatttaaagacccatgcaagagcctggtttgtcatccctgccctagcccaatctgaggctaagattggtaaactgtaagcccacacttaaccttgtcaataggttcttgaaaacttgtacttcaagagaaatgatgtataacaaaaccatactttttctcatcagttgttacaaggaaaggatgttgaacaaaaggcagttatttgaggactggctatacactgtttcacgtaaaagttggagttttcattgttctattaacaatgttaaatgaagacttactgtattttgaaaaccatcattaccttctccataccatttggctcccaaatttaaataaacaagagaaaacggtgttcatctattaaggacctgcagggtctgttcatctctgtggctcaacttaccattgcttttttgcttgaaaagcagcacagatgcaggaggaaaagtgattggcgcatagactgtcgccaccagggccatgtcagcagtcaggaatctctgcaatttatgtttgtccgctgccataagggttaaaaaatgaaaagcaaaaccattttgagaaaccagaggtgatagaggcctgtgaaaagctgtattagtgcaactcttaaacctatggcagcttctacttctctaaaccaccagttctcaaaaattttcgctgcctcaatgcacctaaaagatacgatctagtcctatcagtaactttttttttttctttttttttgagtttgagtatcgttcctgtcacccaggctggaatgcaatggtgtgatctcagctgactgcaacctctgcctcccgggttcaagcagttctcctgcctcagcctcctgagtagctgggattacaggcacatgccaccacgcccggctaatttttgtatttttagtagagaccgggtttcaccatgttggccaggctggtctcgaactcctcaccttgtgatccacccacctcaatctcccaaagtgctgggattacaggcgtgagccaccgcgccaggctgtatcagtaactttttatttatttatttattttgagatggtgtctcgctcttgttgcccaggctggagtacaatggtgccatctctgctcactgcaacctccacctcccaggttcaagtgattcttctgcctcaggctcccgaatagctggaattgcaggtgcctgatcagtaacttttttatctggagtcagaatcttggagcctagactgtatttgatgttctaccttcaaggtagccctcacctcctttttaaaatactaaacttaaaggaaaataaaatattttaaggcaaagaaaaattaatctcacttagagattgtgattctcacaattggtgagaataaaaattatccaaaacaccattaatactgctttcttcatattcctcctgccactgctgagagtgagtgaactaggacgatgttcagaagcccccaagttagtgggcaacatatcttcctgctcctactgtgtaggagacaatcatttctgctgcaagtcccgtccagtagtctctcagtatctcaggacccctacctctgctttacccaactatgagccatacccagcctccattccttcacccacactgcccttggcacactagacatcaaagtttccacactttatcacacccttttaaattctgagagacagtgtctcactctgctatctaggctagactgtatttggtgttctaccttcaatgtagccctcaccccccttttaaaaatactaaacttataggaaaataaaatattttaagggctgtggtgtgaacacagctcactggagcctcaaactcctgggcccactggctcaggcaatccctcttgcctcagcctcccaagtagctgggactgcaaagcacatgccaccacacctggctaattaaaaagaaaaatttttggccgggcgcagtggctcatgcctgtaatcccagcactttgggaggccaatgcgggtggatcacctgaggtcgggagtttgagaccagcctggccaagatggtgaaactctatctctactaataatagaaaaattagctaggcatggtggtacacgcctgtaatcccagctgcttgggaggctgaggcaggagaatcacttgaacctaggaggcagaggttgcagtgagccaagatcctgccactgcactccagcctgggcaacaagagtgaaactccatctcccaaaaaaaaaaatttttttttcgtagaggccgggcatgttggctcatccctataaatcccagcactttgggaggccaaggcacgtggatcacctgaggtcaagagtttgagaacagactggccaacttggtgaaaccccatctctactaaaaatacaaaaagtagctgggcgtggtggcagacacctatggtccgagctacttgggaggctgaggcgccagaatcacttgaacctgggacggggaggctgcaatgagctgagatcatgttactgcactccagccttggtgacagagttggactctatatcaaaaaaaaaaaaaaaaaaattgtagagaccggagtctcacactcctgacctcaagcgatcctcctgcctcagtctctgcaactgagacttttatttagttccagttctaaggatctgcctttacaaaataagcaaagaagtaaataaagttttatgcatacagatctagtttagagcaaaacattagaaatagcctaagtgctcacccgtagaagctcaaataagtatcagtacatcacatacactggaatatatccaaatgacaataaagcattaaaagtctcattaactaattaatcttatggaaaattgatcaaaatcaattaagtgataaatgcaatgtttaacaccatatttacaattacaatccaaattgtgtaaagaaaaaaaatgagatctggatgaaaatgtataaaataaaaatgaattttctctaatataaggtaattttacttttacattattccttattttcccaactgtataaaatatgaaaatagttcatcctaaaaaaaaaaatcaaaaccattttgaaacaataaaagaatgactggccaggcgcagtggctcacgcctgtaatcccagcactttggaaggccaaggcaggaggatcgcctaaggtcgagaccagcctggccagcatggtgaaaccccgtctctactaaaaatacaaaaattagctaggcgtggtggcgggtgcctgtaatctcagctactcgggaagctgaggcaggaaaactgattgaacctggaaggcagaggttgcagtgagcctggattgcaccattgcactccagttgagcatcagagtgagactcggtctcaaaaaaaaaaaaaaaaaaaaagaggccaggcacattggctcatgtctgtaatcccagcactttgggagaccgaggtgggcggatcacctgagaccaggagttcaaaaccagcctgaactcctggtcttggtgaaaccccatctctactaaaccccaacatggtgaaaccccatctctactaaaaatacaaaaattagctgggcatggtcgtgcatgcctgtagtcccaactactctactcgggaggctgaggcaggagaattgcttgaacccgggaggcggaggttgcagtgagccgagatcacgctattgcactccagcctgggcaacggagtaagactccgtctccaaaaaaacaaacaaacaaacaaacaaaaaaaaacaaaaaaaacaagagggggcgcggtggctcacacctgtaatcccagcactttgggaggctgaggcgggcggctcacgaggtcaggagatagagaccatcctggctaacacggtgaaaccccgtctctactaaaaatacaaaaaattagctgggcatggtggcgggcgcctgtagtcccagctacttgggaggctgaggcaggaaaatggtgtaagtaaacctgagaggcggagcttgcagtgagcctagatcgcgccactgcactccagcctgggcgacagagtgagactccgtctcaaaaaaaaaaaaaaaaaaaaaaaaaaaacagaaacaaaaacaagattaaatcttaccttttttggtcttcaattccccgttctaatgccacaagtgttgggattacaggtgtgaaccactgcaccactgcacccaccctaataccctttttataaagctgccaacttctattcaaaacctgctatggaacaaatactcatggcaaaaaagcctcagtatcacacagaagttgcatcactgggatgcttcagacaggttcagacattttgaataaaaacatcattggctcttaagccagagtactgaaaatacctctaacccagagatgtaagattttgaaaccatatattttggcacccctccaccacaagtcactttcccaaaagacaagatggacaagaacccagcttccccattgctaacctgcagtgtgctgagagaataaaggtgaggctcggaagcgcctgaatccacagtgaaatatgagctcttccttggctttcacaggttcagtgttgccagggtcacgcctcaccaccatattcaatactgacatctggggaccaagtaagaaaaacaaaaatcttcatagtctaggaatacaattgcctaaactgaaagaaggcaaaccaaactagcagattcagactcattctaagaactgacaatgctaattaatggtggagtgtagatgctgaaacacgggttcatcctttacctccaccaatgactggcatttaagccaaacacaggctgatcagagctttcatgcacccttcaatgctaacctaccttcctgcacctaacagaaaagagctcaacatctgccacacaaaaatcagtggccttcaaggcattcactcaccacaatctcaaaaccacactcattcaagccccttcttcttgagcccttaccaaaaccgatcaaagaactatcacataccccacaacatacacaactactggccaccaagagaaaagagatctgcactttggcataaactttttttttttttgacataagagtttcgctcttgttgcccaggctggagtgcaatggtgcaatcttggctcaccacaacctccgcctactgggttcaagcaattcttctgcctcagcctcccaagtagctgggattacaggcatgtgccaccacgcctggctaattttgtatttttggtagagacagggttcctccatgttggtcaggctggtctcgaactcccgacctcaggtgatccacccaccttggcctcccaaaaagtgctgggattacaggcgtgagccgccgcgcccagccaaacctttatttttaaggctgccaacccttattcaaaatctggtctgaaaaacatacttggagaagtctcagaaccacacagagattgcatcactgagatgcttcagacaggttcagacgatatgaataaaaccatcattgacttctctattattctccaattcctaatcataaaggcagactttttgcatcccaatgagcaaaattttagtcacacataaacagaattttagactgtcagaagcagctggaaagtttcacaaccccccattttcccacaagacagcaatttaccttctgttcatgaggtagtaaagaaaatgcaatcaagggtgttccttgcctgaagcactcgaccactgagacggggacttcagagacatgaagtgtgacataccagccaacctgccacaagaaagcagaaagcaatcatggagttacctttcaaagtcccaatagcgaggaagctttctccaaatatgttgagtctctcagataaaatttttaaagccaaccctcatccttcaagatgcttcatttacccagatcacactttttcatttaacatagctgatacctctttgttcccagtatcattctaatcaatgactcaggggctcccctaatccccaaatgcagcatattttcatgccaagagaaggaataaagtagggagcatgttgacaaatgaaagcaacatacaagatgaacaaggaggatagatacctcagctccttcaacctctttttcttcaacctctttaaagatgcttttcctagtgttagtaaagttctgaaactgaaatattcgagcataatcttgaggaaggttttccttaggatcccatggagatgtccggaagctcttaaggcctctgtatttctgaaatctagaatattgaagatttttaaagacattaagtcagatttatatggtgctatatagactcaagtcactgctaaaatggctaaggagctagctgaaaagaactccaatcatcctctctccaaacaacccaacagcttaaaccaagacgacactccgaacagcttataacaagttctatcggaaccaaacccaagcttctcactgacaaaaaagatgcttggtaatggcctgatacagttcagatgtgtctccctgccccaatctcatactgaaatacaatccccagtgttggaggtggagcctggtgggaggtgactgcattaggggagaggttttctcatgagtgggttagcaccaccctccttgttgagtgagttctcatgagatctagttgtttaaagtgtgtagcacctcctgccttgctctcgttactgcgctggccgtgtgacatgacttgctccccctccaccttctgccatgattgtaagtttcttgaggacacccccagaagctgagcagatgccaacaccatgcttcctgtacagtctgcaggaccatgacccaattaaatctcttttctttataaattatgcagtctctggtacttctttatagccatgcgagaatggcctaatacatagccttacctcctaatatccaaaattaattcactggctttagtcactcacctccagaacagatataatcatctacttcttcactcttctacttctgctattctacccaaaccccctaaaatttccaaacattatatacttcaattgagtactggctcctttgggaagaagtatttgctaattaaccttagtatttccccttcattcaagtcctgtaacgtgagtctgcaccacagtctagaacttaattacatatgaccatttcccgtatgtatgtcctgccttcccatattaaatgttagctcttcaggagcagaaaaaatgtgtttttcttcttttgcatcacagtgacacagctctgagccaagtttttaaaaacgtattgactgaatttagatttgttgatagacttgttgactaaccgaattcgagcagccacatcacggggcgtgtccacttcatctggaaacatctcttccagtctttcttgtttatatttctccaacatttttgcctcagcttcttcatctactttcttatcatacagatcatcatgcacagactccccaatagtcatagtttcatattcttcctcttcttcactactctcatcctgtagaataggattacagttttttcagaagaaatccacacctgtctctaccccaaaggccaataagctaagagtaaaataattgtactagatccctattcccaaccaacataaattctaatacagtctaaagtataaaacaaaagcctcattcctggcaactacagagtcattcctaagaaactaaccatacacggccgggtgcggtggctcacgcctgtaatcccagcactttgggaggccaaggcaggcggatcatgaggtcaggagattgagaccatcctggctaacacagtgaaaccccgtctctactaaaaatacaaaaaaattagccaggcatggtggtgggcgcctgtagtcccagctactcaggaggctgaggcaggagaatggcgtgaacccaggagggagagcttgcagtgagcccagatcgcaccactgcactccagcctgagcaacagagcaagactccgtctcataaaaaaaaaataaaaaaaataaaaaaaagaaactaaccacacacacccatcaagatcacacctgcactttgccttacatttggagctagacacagaattggcctaaggcctcatttccttacctgagattcctcctccataaaatcctcatgttccatatcatcatattcatattcatctccttccccaccactttggctgccaccatccaaaatccattcagcttggtaactggatgttcctttggggaccttctttaccaccttagaactttccttcaagaaatctgtaaaagcccaaacaaattaagtaaattacagacttcttttccctatccctctggttattctcacctaggcaaggcaccagatactgctgccaacatgggaaattctggcagacactgtaaatagaactacttccaaatttaattcagctgcctcacaactagcaatacttacacagctaaataagccctgcaatgaatccaaagttgtttatctgttcatgataaaacattaacacaagtaattttgagaaatggaacaagactgtgtataatgtttgtttattgaaaacatacagcatttgagggtgaggagagactttcaactatacccccaccccactctatcctatagggccctcacttggaacagctacagaaaatccacaattccaggtcagatgaattacagacaagtttaccaatactgaccctttgcctcgctcagctcctcctcagtgggccaggtttgctctccctccattggatctgggataacctctgcttgcaaggattcctgtctaccagggtctgccttcattaggactttaagaccttcttccatatcatctacagcatccgtagcacaaatctgaaaaccaaaagcaggtgatagtcaaccatgaaccaaaaatctcctaaatctaacacagtaaccagaaagacccagaaatatcagtcctcatgtataagatgagtgcgacagaatgctaaaacttgtcaaaacttttccaatggctgttttctaatttccagggtattttaagtctctgcttggctcttgaggtctttcttaatctgctcccactcctatccatttattacgtacctcactcccatcaagctgatttcttcaaggttcacataaaccctttgatccaccactgtgcctaggttcattctgtctcttatcttctaggatattcttttatccctcttcaactcataaatcacatttatccttctcaacacctagctcaagtctgatctcttatgtgaagcttgctagtctactttctcaacttccactgctggtccgcactctaaccatatgctatctcaatctttatttcacacatgccattttgttccagcccaattaagtcccttgaggaaagcaaccacatcttgagtgtgttctataaactcagagccaatcacagtgcagactacctagaaagtgctggataaatatgtgatttatcaacctatttataactgactattgccttacttcagactagcagtctcctcattcacctaagtgtacagactatcttctctgaatttaagtttccttcctgtgccaactttcatatgaacatgaattaagaatatcagtcttacctccattgccatgtctgggtccttttggggtttaattcctctaggatttaaagggaaagggtctccgggggcatctatctgtttcatctggaaatcaccatatccaacgatatgcagcaacctattgacattcagagtctgccctcgaacatagcctgaaattttcaaggtgcccaccaagttattctcttcactaggaacaaaatcaacagcatgggcaaataggtaggcccgccgatctcgaaaagcaagatgctgttgcttctggttagccaactgcctaagcagcatccctgcctcctgttgagtgtctaacaagaggagtttgtcatgcggaaagcgcttctccactgctttacttagcttcttcctggtatctatttgtttcttcagtgggaggccagaaatcccctggacagctagtgctgtaagcgaaagagaaaacgcttcatgacctactgcttcattacataaaaatccctctgcagttcacaaacaacctaatagctcagttgcaagcccagagatcactgggaagcccaacactgaactaccctgaaggaatttcacagtgaaatcaaacttcatatccttgtttctctgggcaaaggacagccaaaaacaaaaagacaccctgagtgataatctgtaaacaatggatcaagtttaatccatatgtgtacatcccaccaccagctgaatatgatccatcagttgtattcctgtatcaaataccaggcatagtgcctgacaaattaaaggtgcacaataaatgctaactcacttactataggtcggaaggccctgagcaaagaggcaggaaagacagtaatcaccggtgctgtcccagccttctagtggatcaaggaggaacaggatggtatcagctactttagccatgtctaacacaacgtgcagatcccctgcagatagaagacacagtaagaagaggtggttggcaccagcacattattctaaaaaaaaaaaaaaaaaataccactactcaaacataatacaaaatattggtgtatactctaacctggccttgctgaggtgaaaaaccaccgatgtttcaagcgggggcacagcagcataaagttctgggtgtttcccaattcattcaagtgtactgttccagtgtccctatcttgaagcagctgcatggcctctggcagggaaattctgctgtgcaggggcaccaccagtacctgatgaggagggccatccttgccacccagctgtctcttctctgccagaacctgaaaatagaaagatatccgagaacatctcagtgtctcagtacttcactccagcattgcatttccactcccacagatgctccccctacccaaaaccagcatctctctagtaaaagaccacaggtatgccagcggggtggcaggaattctgaccaaagcaaagaatgctagacctgcacgctcgacacgtgctctagggctatgctctgtccctggaccctcctcccggtctcattttccacttcgaggcattagccacctagaacaccagagaagccgcattctcccaaatcccgctcctctcaccgcctccttcttctgctttcggagctggctggcgcgatgcctctggtcgactctgctgagttcttttctcaccttcttgcttagggttttcagtgccagacggcctgaatggcagattagaaggggctggtgtgatcggccccacaaggtcaagaaaagggactcctctccgcccaccttagaaagggcctttcgcgtggagcccagacgggagacagaagctcagtctgggcatgaggaaaaagagttaataacggccaaatagcccttattccttctacgttatctccttacccttgccgtcccgctgtgcagatccccgaccccgatgccgtccgcctttatgagctttattctgctgcttgagcgggccggggcggtgggccgccatgccgcagcgcgcgtgtacggagtcagcactgcttccgggccaggacaagcgcttccggtcccctccaagggggcgggccctccagggagcgggactccctgcgccctctcgcgaaggtcttttccagcagctcgtgagagcgccgtgttagcgggttcgccaagccgcgctgggaacttttcccacttcgcagtgtgtggttgggggcttgaaggcgccggatgtagactgtcgaggctcgggctgttggtctagcagggctgtttgtaccccttgcattgtcatttttttgcgctataaagctgcatcacgtagaagcatgttgactggaaggctccattcgtgccgaaaaggcctaagcccttcctgtcacctagattcgggcacgttgctcttccgtttgcaacggcatgttctttatcactctgagcaacctttcttctccctcgattccctagcgaggcttgggaatcgcgtggaagacacttctctcaccttgcccggttccgtaccagctcaagcccgtccctgttactccaacctgcgccccgcctcccacggagcggccgggaaggaccttgtgggacgtggcgacccggcaagggggactggccgcgaccctccggccgtcgggctcgggcggctgcgctcccactaatcttcccagaaacttgacaactgcacggcgacggccggacggggattcagaggggtcacggggccaggctgcaccggcttcgccgtgggcaggctcggaccgcaggggaccccatgcccgagccccggccctttccgtcccgtcgggagagggagcaggcagaagtcaggggagcttcagcgggaccgaggctcgctctcagccgcggggccgcgggctccagggccagcgctcacaatgcggcttcgcgccctccatgcgggagcgggtgcgttgccatgacagcgacccccgtggcgcgcgcccgggtctgccgcccctaggcgcgcacggcctctccccgccccgatcccccgtcgctgtgcgcaacccccctccggctgtgggaaggggccgggcctgccgcctgacgtctgtgcggggctcggaagatggctgcggagccgagcaccgggcagtggctgcggcggcggcggcggcggcgggccgggagcgcggcgggcgggggctccgccttgcgcgtggggcgctgagccgagaggcgcggaggcggcgagggcgcgggggctctgaggaccgctcggcgccgcctcctgccacaccatgggcagcgcagaggacgcagtcaaagagaaactgctgtggaacgtgaagaaggaggtaaagtcgagtcaagaaccccggggggctcgcgccctggcccgcgcggcccagggggcagaaaggtccgcgcccaccccccggcgcgggcacccgggccgaacctgggccgggcggggcgggtcctggacgggctgcgcctccttcccctttctcggatgggggagggcagcgcccctctgcccgggggacccggccggcgctcccggcttgtttgcttcgcagccccgcagctccccgcccagtgacggcagcggcgctgggagcccaaggccgggggaggggtggcggcgatggcggggatggctggatccggagctgcccattcagtgcccgcgccgccaggggagggggcggggccccgcgcgagctcccgcggcgcaggtgggtgtcgtgcgggccgagcttccccacgtcctaagtgggtgtcgtgcgggctgagctcccccttgtccgacgtccgctgtgcctccagctacggagtgatcgctgccggaggggtgcgccgcacacctcagtttctccctccacgcccacctccttagccagggaccaggggcttgtttggaatggtttttaacactcggaagtttttcccttttgagggaagcccccctacttcagaaagagaagtagtccttccctctactaactccgtttaccttgaccctgcccaaaagcccatttccatttcgggtggggggcagtgaccatgtgaatgactcactcccatatgagagctggagagctccaacccacagcgcagcttagaatacattgggcctccttcccctgcctgcctctgtggctgttgtctgcctggtaagtaaactccaccagggcaggagaccctctgttttgtccactgccttgtatccagtgcctggcatactgtaggcactccgtgactgtttggtaaataaatgtgctgattttggagacttcgaggcctggtgtttggaaagcatacattttggaatagtctggacctaattctgtgtgaccttgagtctctatgccgtctccctaatatatatatatataacctcacgcctgtaatcccagcacgttgggaggcctaggtgggtggatcacctgagctcaggagttcgagatcagcctggccaatatagtgaaaccccgtctctactaaaaataccaaaataagccaggggtggtggtgcgtgcctgtaatcccagctacccgggagactgaggcaggagaatcgctggaacctgggaggtggagattgcagtgagccgatattgtgccactgcactccagcctgggcgacagagtgagactccgtctcaaaaaaaaaaaagtttaccttagctgagccgtaattagagtttcagggttggggaagcgtctggactctcataacatcctggaaagtggacaggcgcggtggcttacgcctgtaatcccagcactttgggaggctgaggcgggtagatcacgaggtcaggagttccagaccagcctggccaagatggtgaaaccccatctctactgaaaaaaacaaaaaatacaaaaattagccaggcacagtggtgggcacctgtaatcccagctactcgggaggctgtggcaggagaatcgcttgaacccaggaggtgtggttgcagtgagccaagatcgaaccactgcagtctagcctgggcgacagagcaactctccgtctaaaaaagaaagctgggcatggtggctcacgactgtaatcctagcactttgggaggctgggacgggcggatcacgaggtcaggagatcgagaccatcctggctaacacggtgaaacctctctctacaaaaaattagctgggcgtggtggcgggcgaatgtagtcccagctacttgggaggcaggagaatggcatgaacccgggaggcagagcttgcagtgagcccagatcgtgccactgcactccagcctgggcgacagagcaacactccatctcaaaaaaaaaaaaaaaaaaagtcccggaaatctctagatggttctcatgcgttagccatggcctggctactaggccctaatgtttgttcccacccctccccttggtaaagatgtagttgaagccatcagctttcccgcttgtgggagaagcttcattatgtctttgctgtgaagaggcccaaaaaaggatttcttaggccaggggtgtatcaagtcagcatttaagcccaattctgctctccccaatgaaaagagaaatcttgattctcctgcaaaaggaagcagtctagtgacagagacttgaacagtgtaaacaaaatagaaaagtacttgtgtctacacttgaggtggatatgctgggattatagatatggctcaattttggaggttagtcacagataatgggaaatacttttttttttttttggagacggagtcttgctctgtcgccaggctggagtgcagtggtgcgatctcagctcactgcaacctccagctcctgggttcaagcgatttccctgcctcagcctcccaagtagctgggactacaggcacatgccaccacacccagctaatttttcgtattttagtagagatggggtttcaccatgttggccaggatagtctcgatctcctgacctcgccttggcctcccaaggtgctgggattacaggcatgagccactgcgaccgccaggaaatattttttaagaggatgatgactttttccaccagtgcttagaaactggactatactgctccaaaagtgattcctaagaaaatgtgagaaatgtcagaatatgccacagctacgtatcattcctgacaaaagttgacctgctctgaactcatgtttctcctttcctccttcagtgtttgatttctttttttttttttgagatggagtctcgctctgttgcccaggctggagtgccgtggcgccatctcagctcactgcaagctccgcctcccgggttcacgcctttctcctgcctcagccttctgagtagctgggactacaggcgcctgccaccacgcccggctaattttttgtatttttagtagagacggggtttcaccatgttagccaggatggtctcgatctcctgacctcgtgatccgcccaccttggcctcccaaagtgctgggattatagtcgtgagccaccacgcctggcccagtgtttaatttctacagaaacatcctgtcccttctgcaaggaaaaacaacaggaatattggtagaccaggctggcctttcacaaaggaccactggtataattctaggggtatctgcagatccttcaacccaaaaatcctccccatcagcctgcttcagatgcctccaggtctttagctgtgacattatcctctgttgaatgctaacatccttgggaggtaatctaggaagttttttttgtttgtttgtttgtttttttgagatagagtttcactcttgttgcccaggctggagtgcgatctcagctcactgcaacctctgcctccgggttcaagtgattcttctgcctcagcctcttgagtagctgggattactggcacccaccaccatgcttggctaatttttgtatttttagtagaaatggggtttcaccattttggtcagcctgatcctcccaaagtgctgggattacaggcgtgagccaccatgcccagccgtctaggaagcttttaacagcttagagtgcatttgcattaattgatctgatccccttttacctgagcactaaccattagcagtttccggcagggaggggcctccaggtccttcttcccgcctccccaggcttttgaggttctaccaccctccaaactatacagtcttgactaagggtcttgggaacctggacagcatcagaacattacattcctgtctaaagaatggggaagactagctctacccaaggctcactttatgtgtaacattctgcactaggtaatctctataatctccagtactaggactgcctgctagcaggttctcccaggacatcaacagagtttgggttaaatgttgggaaccaccagaacctcatacatgggagtgtaaagtggtataaccaactttggagaacaatttggcaatatctaataaagtgtgtgcatcagacattccttgcctagaaacataaatcccaaacatttgttcaccagaagacagtcctcaatgttcacagcagcagtatccataacagccccaaactggaaaccacccaaacgccgggtgtttgtacgttcacaccacggagagtgaacaacctacaactgtacacaacgcgcacggagaatgaacaatctacagctatacacaacatgaacaaatttcagaatgacacaggtgagcaaaagaaactagtcacaaaacactacacgctgagtgattccacttataaaaagtataaaaacccaggccgggtgtggtggcggctcacacctgtaatcccagcactttgggaggccaacgcgggtggatcaccgaggtcaggagttcaagaccagcctggccaacatggagaaaccccgtctctactaaaaatacaaaaaaaaaaaaaaaagccaggtgtggtggtgcatgcctgtaatcccggctactgtggaggctgaggcaggagaatctcttgaacccgggagttggaggttgcagtgagctgagaacgcgccacttcactccagcctgggcaaaagagcgaaactccatttcagaaacaaacaaacaaaaaaagtataaaaacccacaaaactgtcgtgttggaatcaggagagtgggtacccttagggggaatagtgactagaagggaaggtgatgaggcgagggtgttggtcacatgttctgtttcttgctctagttgctgatttcacaggagtgttcagtttgtgaaaattcaccacgctgtgtaattgtgatatgttcttttatatgtttactgcacatcagttaaaaagatttctttttaagtgctttcttaaagaaatgactgagcacagtggctcacgcctgtaatcccagcactttgggaggccgggcgggtggatcacctgaggtcaggcgttcaagaccagcctgaccaatatggtgaaaccccatcgttactaaaaatacaaaaattagcagggcgtggtggcatgcacctgttgtcccagctactcgggaggctgaggcaggagaatcgcttgaacccgggaggcagaggctgcagtgagccgagatcacgccactgtactccagcctgggcaacagagcgagactccatctcaaaaaaaaatgactgtttaccttacaaggtatttgggaacttttacatccaggtgggaaccccaaacatcagagttctagaccctagatggaaagaaggctgggcttttgagcatgtagagggtgtccctgaggtatgagacctacccctaaccttggagaatagggagaaaaggaggaggggcaggttgtttatctgcaggctgtaccgagatggtttgtctctaaaggacagtatatctgcccagaagcccttcgtgagctgagaacagatgagcaaacagcatcctattcctgttctccaaggcagggcacttccacctgggctggaacatgcactgattgtttgatgggtttttggcatctctttccctggtttcccctccaaaagactggaatcagactgtgctgaagaaactttgcttccccacacctttcatccctgtcatctctgcaagtgtctgaaagtgcccttcagaccagaagggcggaaccaaactatttatttgcccagaggtctttgataagggaaaataataaaagcagtgatgctgtccatgtgtccgcaggtgaagcaaatcatggaggaggctgtcaccaggaagtttgtgcatgaagacagcagccacatcattgctttatgtggtgagtgagtgactgaaggatgatgggaggtcggtctagagccgaggacactggcctggggccaggaaaagatgagtcctcaggtgcagtagctctcaaatctggctgcaagtccaaatcaacctggaagcttttgaaatcctctttggccccatttgcagacctactaaatcaggttcttcaggggtcaagaatctgcgtattttttgttccccaggatagtaattctcacattttagcatgtatcagagtcacctgaagggcttggtagaacacagatttctgggtcccaaccctggagtttctgattctagtaggtctggggaccccactttgagagccgctgccctaggtcatttgagttcaggaaccagtgctctgactgattttgattttgacttcagggaggggtttgtgcttttcggatgctctgtgccactttccctttgtttcccacccgtgttgctccatgatcctaaccccaagcccttgactggatgcaaaggagcctgagcgtgggctaggagaggtggctaaggcttccagcctcagaagggactctctcatcacctccttctcagtgtggccaagccttccagccccagaaaggagagagtcgcttataaaccatttccgcctcctcagcctgaagacttttgctttgtaggagcaagcctatccctacgcacagactcttcttggatttctaggaatttcagcttcctctcaaccccccatctgaagggacagggaaccattcaccttctctgtgttgtattccttggcctctgagattggtgttggggtttgtggagggaaaataatgaaagaacagataagggaagggatgctttggacggtagtgtggcacagcagatacagctgcccttcccctcatccagcagcagatccccaccaagggctcaccaggtgccagacaccgttcaccgtgcaaggaaatggcagtgacaagatggacagagtctctgccgcaggagcttacattctgttggggagacagacaggaaacaaatgcgcaagtaaatatgtcatccaataacttggcatgtgataagagctaggaagaaaaaacatgtgggagggcagtcggagaggcagcctctgagcagagtctgagtgacagactggggtttgaatcctggcgtcctgccttttaagtcgtcttggacaagtttcttaacttctctcaccctcagtttgctcctctaaaaacagactgatgattcccacctcaaggaactttcgtggggattgagatgatgtgtgtaaatgttcattcgttcgtagcattgtaagcactcaaagaatattcgtctctcctcctttggctgttgaggctgaaggtaggtttgtaggacttgagttcataccatgtccgtttgggaaggtttccccagttctttgagatggtggaataatgattcctaggtttacaagacacagcctgacctcagtttttctcagcagaacctatgctctggaaaaaaaaaaggcatgccagtattatgataagcaactttgaagagtattagaattctcggccgggcacagtggctcacgcctgtaatcccagcactttgggaggtgaggcaggtggatcacctgaggtcaggagttcgagaccagcctggccaacttggtgaaaccccgtctctactaaaaatacaaaaattagcagggcgtggtggcgggcgcctgtaatcccagcactttgggaggtggaggtgggcggatcacgaggtcaggagatcgagaccatcctggctaacacggtgaaaccccgtctctactaaaaatacaaaaaattagccaggcgtggtggcgggcgcctgtagtcccagctactcaggaggctgaggcaggagaatggcgtgaacccgggaggcggagcttgcagtgagccaagatcgcgccactgcactccagcctgggtgacagagcgagactctgtctcaaaaaaaaaaaaaaaaaaaaattcctactttttaaatactgacagctaattcccatttaaaaaaaaattgtgtgggccacacaaaagacatctgccagcctctgccagtgtgcagcctctgttttgggttcggtacagtcacggagaacaggagcaggagaggttccaacagtatcgggctaagtcaggccagggtatctcagggcctacagacagagaaatccttatgctttgtcaaaattggtgctcagtggtgagctaaatcccaatttgggctgaaactgaggctcgttgaaagcattgattatcaacctttttcctctgcctgcaaagcagcttccttgcattgcatggtggaatcacgagagactcttgcgggggacggggagggaagactagcaaggtatggatcaaaaacaccacccctctctgcctttttggagattctgatgtgccagtctccctcagtccctggaaaaatgctctgaaatgcatttttagtctgaagttgatccagacttaaactgtgccttgctactgtcctagccacgtccgaattcagctttgttgtgggagaaatgggagtatagagaacgtgctgagaggtcaagagcagagtgaagtctgtggagactggattaccagcctagcgacaccacggtccctagtttcaagggacccttgtgtactgggcccctcaactccacaccgacccatggttcttggcagaggagggttgggggtgactgaggagagccaggcctaggcaatacaagcttctctgagcttcttagaatgcagacatttaaacagaaaacacagagccttcctggagagccttcctgaagaatcactgtgtcaagacctgaccatgggcaaacccaggaaagtttgcagccagatccccattcctgttacccaacgggaggggcaagactcctaggactggctagaaaattgctttgttgagtgtttgctgtggttgttcctaaacctgtctgtccagaagctggacatgcagtaggcccctgcgagtagaaactttccttgtgtggaagttttcgctggcaaaccagtctggcggcagcaggggggtgggtggggttctctgtgtgctgttcccaggcccgaggatcagaacctatgtaactgccacctccgtgccagtggagggtggcgctaggagaatggactcaaaactaccactatggggccaggcatggtgactcacacctgcaatcccagtgctctgggaggctgaggcgggaggatcccttgagaccagaagcttgagaccagcctgggcaatattacaggatgcagtctctacaaaaaaataaataactcgctgggcatggtggtgcacgcctgtagtcccagctactccagaggctgaggtaggaggatcacttgagcccgggaggttgaggctgcagtgagctatgattgcaccactgccctccagcttgggcaacagagagagagagagaccctgtctcgtttgtttgtttatttatttatttatttagagacggagtctcactctgctgcccaggctggagttctgtggtgctatctcagctcactgcaacctccgcctctcaggttcaagcaattctcctgcctcagcctcctgagtagctgggattacaggtgcctgccaccacacctagctaatttttgtatttttagtagagacaggggtttcaccatgttggccaggctggtctcgaactcctgacctcaggtgatctgcccaccttggcctcccaaagtgctgggattacaggtgtgaaccatcacacccggcctcattttttttttttttttttaaacaaaatccaaaaactaccactgttggggagaggtctttgatatatccttttatcctttttatcttaaaacatcacatcaagtttacatttttctctatcatatggtttttggattttttttcattttaatataaagacttactgttgaattaaagtataggctggtatctcctgtcgccccctcccctggaggggaaggtgcttttgttttttctttttttttttttccagatgaggtcttgctatgttgccaagattggtctcaaactcgtgggctccaggtatgctcctgccttggcatcccaagtaactgggattacaggtgcataccaccgcccgaggtccatagtgttttatttaccctattccgattgggcactgagtttgcattttaacctttggctggtagagcaggtttcagaggctcacagagaggcttctggccaggcagagcaggttctcaggccaatcatatctcccaggacctcagcctccccaccccccagggattggggcagacaccagcctgcctcctcagtcaccagattccctgccctgctgtgtgcaagtgggtcaacatgagggttgcttcagactgaggatgagctgtaattcgagaagggtggaatctgtggagccgggaataacatcaggctttattaaccagctccctgttgctaggcagctttcattagccaggaaggtctgccctgcagtgagctccttcagggaatggcaaggagatgctaataagctgggagagaagccggtgctagggaaggcttgcctctcccctgggatattgcagccagcgatatttcagcacattctgagatttggactccaggcagtcttcagcctgtctcttttcagtaaaagggattcctggaggctgaggtgggaggatcccttgcaggagttcgagaccagcctgagcaaaaaagaccccatcgccacaaaaaggaggagcgggttcctcctccttcccacccacagggaatgaatagctcattctcttgctatctaactcgtgccttccatctagaaatgatctaagaggaaggagggagctctgaaggagctgactcccctcactctatcttggggcattgcggagggcatatggggatgttcatagctgggactttggggtcacacagacctgggttcacatcctggctgtgccacgaagtgtgtagccgtgcttactcatctctgagcctaccccagaaggcagatgtaaggaacagaagagcaatgcaggcaacacacacagcatggatctgagtatgcagaaggtgctcaatcgcattctactttggtttttattttgttttgtttcgttttgtttgagatggagtctcactctgtctccccgctggagtgcagtggtgtgatcatagctcactcagcctcgaccttctgggttcaggcgatcctctcacttcagcctcctgagtagctgggtctacaggtctacgcgccaccacactcggctacttttttgtatttttgtagagacggggtttcgccatgttgcccaggctggtctcaaactcctgacctcaagtgatctacccgcctcggcctcccaaagtgctgggattacaggcatgagccaccaccccaccccacatctgctttgtttttgaaagggagcataggccgggcacagtggctcacgcctgcaatcccagcactttgggaggctcagctgggtggatcacctgaggtcaggagttcgagaccagcctggccaaaatggcgaagccccatctgtactaaaaatacaaaaattagctgggcatcatggtgcacgcctgtaatcccagctctttgggaggctgaggcaggagaatcacttgaacctgagagatggaggtttcagtgagcgagattgtgctgctgcactccagcctgggcgacagagcgagacttggtctaaaaaaaaaaagtgaccttacaacctttcctataaagcctcctcgagccttccccaggattccatctgggaatctgtgtttctggaagtttggagcatctggagaatcagaaatttgaacatcaggaactcaataaggaaatttgataatataaaggaattgttaccaattttgtcagtgtaatagaggtataagtgcatgtttttaagagtcctctttcagagataaatatatatgatgtctaaaatttgcttcagaataatccagtggtaggaaacaatggttgcaggcggaggagctgaagcaagatggtcgtgacttgatcattgttgaagctgggtaatgagtacatgggcagctgttatactgtccccttttccttctgtatatggttggaattttccctagtgaaatgttttgttttttttttttgagatggagtctccctctgtcgcccaggctggagtgcaatggagcggtcttggctcactgcaagctccgcctcccgggttcacaccattctcctgcctcagcctcccaagtagctgggactacaggcgcccaccaccacgctcggctaattttttgtatttttagtagacatggggtttcaccgtgttagccaggatggtctcaatctcctgacctcgtgatccgcccacctcggcctcccaaagtgctgggattacaggcgtaagccaccacgcctggcctaatttttgtattttagtagagatgggatttcaccatgatgcccagactggtctcaaactcctgacctcaggtgatccacctgcctcggtctcccaaagtgctgggattacaggtgtgagccactgcatttggcctagaatgtttatattcacatgggaagtatctaatagggaaaaattgcaggcataaaaaagagaagagaagtttgctggaggagcgtctttgaaaaggtgcaagggaggtggggtgcggtggctcacacctgtaatcgcagcactttgagaggccaaggcaggtggatcacctgaggtcaggagttctagaccagcctggccaatatagtgaaaccctgtctctacaaaaaatacaaaaatgtgccgggtgtggtggcgcacgtctataattccaactgctggggaggctgaggcaggagaatcgcttgaacccaggtggtggaggttgcagtgagccgagaccgtaccactgcaccactgtactccagcctgggcgacagagtgagactctgtctcaaaaaaaacaaaaaaacaagacataagaaatggtgcaggggcagcactccagcctccagcgtgccggtggaaggtgacctcagagacaagtccaactagaccatccctaggaacgagaggaaggcagggactgggcatgaggtgcagggagggaaggcacctgcattcatcagtccccttcggtgtggtaggcaggggccgagaagcctttcacaccttgggatatgctgttacttttcatcacccagcatccattgaggtagaccctgattttctccctaattacatcagaagctcagagaggtttagtgacttgaccaaagtcaaacagccagtaaggagaggagcccgtgggctgggcgtggtggctcacgcctgtaatcccagcactttgggaggctgaggagggtggatcacttgaggtcaggagttcgagaccagcctggccatcatggtaaaaccccttctctactaaaaatacaaaaattagccggccatgatggtgggtgcctgtaatcccagctacttgggaggctgaggcaggagaattgcttgaacctggcaggcggagattgcagtaagccaagatcacgtcactgcactccgacctgggcaatagatcgagactcagtctcaaaaaaaaaaaaaggagaggagctagtgtttgaacccacctctgtcttgctccagactctgtgctgcccagggattggtctgcctgtgaggcctacccaggagtagagactagaggggcggcggcattgaggagttggccctcatgcagacgaagctctggtcattgaactgtgggcttatggtgtccagagacactctaggagactgtggcttccttacccagccagctgagtgtgcccacatcagtgtccactgcatgagaggctggccctggcctggttccctgggtagccgccatgagcactgtgcatgcggaccctgtcttgcatctccagcaggacaaggacaatgggatgtgtagcatggatttcatttccccctccttggttctaggttctgggttcaggcgatctctcacttcagcctcctgagtagctgggtctgcaggtctacgcaccaccacgctcggctacttttttgtatttttgtagagacggggtttcgccatgttgcccaggctggtctcaaactcctgacctcaagtgacctacccgcctcaggacagttctttatcctcccaatcagagtccagttgcgaatgttgctttcttgttttgggggttgagcagggctgaatgccttccaaagttgaagcaaacaaccagtatcaccagtgcaggctgagagaaaatgcaccctagttaccgcagaaacgctcatctgagtaaaggcagccactacaaatccctgggtggaaatagccagggagagaagcggggaagagaggggcaggtcacacttggcgatggcccttcgctcctctcaccttgtctgtggcagatgaaacactggctccttccaccggcagttggagtaaagatacttgatgcttcttctccttcagttgttacttgaaagaggcgggtcctcccacccattcctttatctccaggaaggctgctcctctccggcattgttggttccaccatccagggacctgaaccactggcccccaggcaggcattgggcttttgaattctgctctaattagcgtctcccaaagccccaggtccagaatggactacctgaggctggctgccctgcttgcacttcctcgcttgggttctgtgtggcagcggtggctgaactcccctgtcgtgcagatggcagctggtagcaaaaggtgaaaccgggccggaggtggggagcaagccacacctgccaacttgctgtcctcccattcccaactccgggcccagcatctcaggcccagtttcatgttgagttgtgctaactctgtccctgtacctcaagcaaactaggctagtcctctgaaggccactgagtggttcccactgttaccaggctgggcttgtccaggctgctgagtgcagctttcaacgtagatatatatgcacatgagagccaaggcagaatgcaggtgcagagacccagccctgcttctgaggctccctgggctgactgatgaccctcctaaccactgctgcattttcttttttttttttttttttttttttttttgagacggagtctcgctctgtcgcccaggctggagtgcagtggcgcgatctcggctcactgcaagctctgcctcccgggttcacgccattctcctgcctcagcctcccgagtagctgggactacaggcgtccgccaccacgcccggctaattttttgtatttttagtagagacggggtttcaccatgttagccaggatggtctggatctcctgacctcgtgatccacccgcctcggcctcccaaagtgctgggattacaggcgtgagccaccgcgcccggcccactgctgcatattctagcagccgagctatagttcatttctgtgagctcctgagacaccttagcttgtctcagccctctggatcgtttctctaatccctgccccgctcaggtcacctgctgctgccctaagcagagcccacatgcgccccctagtggtgggaaaccaaacgattccacagatcctgtttgttgagggaggaggtgaaacgagatgcccacgggcgacccagccttcctgggttttgtgaattctgattcacacctagattggagagactctctggcatcatctcatgatgggaaccctagtgctggtcacccactcaattattataattaattttgcattcataatatatttaactggttcaaaaatcaaaaccatataaaaaggatacagtggggccgggcacattggctcacacctgtaatcccagcaccttggaaggctgagacgggcagattgcttgagctcaggagttcgagaccagcctgggcaacatggtgaaaccctgtctctactaaaaatttttaaaaattagccaggcatggtagtgcacgcctgcagtcccagctactcagcaggctgaggtaggaggatcacttgagcctgggaggcagaggttacggtgaacagagattgtgcccactgcagtccagcctgggtgacagactgagactctgtctttaaaaaaaaaagcgtgcagtgaaaagtctcactcctttctctgctcttattcacccacttcctgtctatgtacgagtcccacacaggtaaccacttttgtttctcatgcatccttctagaggttttcttatgttggttttttgtttgtttggttgttttttgagacagggtttcattctgtcacccaggctggagtgcaatggtgcaatctcagctcactgcaacctcctgggctgggctcaagcaatcctcccacctccacctcctgagtagctagaatacaggctcatgtcaccacacccagctagtttttaaattttttgtagagatggggtctccctgtgttgcctaggctggtctcaaacttctgggctcaagtgatcttcccaccttggcctcccaaactgttgggactatagatgtgagccactgcacctgacctagagtttttttgtttgttttttagtagagacggggtttcactatgttacccaggatagtctcaatctcctgacctcgtgacccacccgcctcggcctcccaaagtgctgggattacaggcgtgagccaccgcgcccagccaagttttttatactaataaaaaagattgtattctttgttcacacctccctttttgtaattaaaaggtgtcatgcaattataccattctgcatcttgctgttggcgagctttccattattcattcctagagagcatcctcattctttttcagagttgcatgatattctgctagagatgtaccatatttacttcacctgtcccctattgatgggcatgtggatgacttccagtcttttgctgttataactaaataatcacgcagttatatctgtaggacggattctcagaagaggggttactggatcagaggttatttgcagcattagtggagagggccatattgcgtctatacgggttgcagcatcttgcctacctaccagcaatatatgaatggattcagcagctccccacgtcccttccatctgtgtcttcctggcgtctcctctactctaaattgggtctcttggaatggtgaaatcagtgtgtaagggttgggggcagggaccctatatcttagaatggtggaatcggggtgtaagcgttggggaagggaccccatatcttagaatggtggaatcggggtgtaagcgttggggaagggaccccatatcttagaatggtggaatcggggtgtaagggttgggggaagggaccccatatcttagaatggtggaatcggggtgtaagggttggggaagggaccccatatcttagaatggtggaatcggggtgtaagggttgggggaagggaccccatatcttagaatggtggaatcggggtgtaagggttgggggcaggggccccatatcttagaatggtggaatcggggtgtaagggttgggggaagggaccccatatcttagaatggtggaatcggggtgtaagggttgggggcaggggccccatatcttagaatggtggaatcggggtgtaagggttgggggaaggggccccatatcttagaatggtggaatcggggtgtaagagttgggggaagggaccccatatcttagaatggtggaatcggggtgtaagggttggggcaggggccccatatcttagaatggtggaatcggggtgtaagagttgggggaagggaccccatatcttagaatggtggaatcggggtgtaagggttggggaagggaccccatatcttagaatggtggaatcggggtgtaagggttgggggaagggaccccatatcttagaatggtagaatcggggtgtaagagttgggggaagggaccccatatcttagaatggtggaatcggggtgtaagggttggggaagggaccccatatcttagaatggtggaatcggggtgtaagagttgggggaagggaccccatatcttagaatggtggaatcggggtgtaagggttggggaagggaccccatatcttagaatggtggaatcggggtgtaagggttgggggaagggaccccatatcttagaatggtggaatcggggtgtaagggttgggggaagggaccccatatcttagaatggtggaatcggggtgtaagggttggggaagggaccccatatcttagaatggtggaatcggggtgtaagggttgggggaagggaccccatatcttagaatggtagaatcggggtgtaagagttgggggaagggaccccatatcttagaatggtggaatcggggtgtaagggttggggaagggaccccatatcttagaatggtggaatcggggtgtaagagttgggggaagggaccccatatcttagaatggtggaatcggggtgtaagggttgggggaagggaccccatatcttagaatggtggaatcggggtgtaagggttggggaagggaccccatatcttagaatggtggaatcggggtgtaagagttgggggaagggaccccatatcttagaatggtggaatcggggtgtaagggttggggcaggggccccatatcttagaatggtggaatcggggtgtaagagttgggggaagggaccccatatcttagaatggtggaatcggggtgtaagggttgggggaagggaccccatatcttagaatggtggaatcggggtgtaagggttgggggcaggggccccatatcttaaaatggtggaatcggggtgtaagggttgggggaagggaccccatatcttaaaatggtggaatcggggtgtaagggttgggggaagggaccccatatcttaaaatggtggaatcggggtgtaagggttgggggaagggaccccatatcttaaaatggtggaatcggggtgtaaggattggggaagggaccccatatcttaaaatggtggaatcggggtgtaagggttgggggaagggaccccatatcttaaaatggtggaatcggggtgtaaggattggggaagggaccccatatcttaaaatggtggaatcggggtgtaagggttgggggaagggaccccatatcttaaaatggtggaatcggggtgtaaggattggggaagggaccccatatcttaaaatggtggaatcggggtgtaaggattggggaagggatcccatatcttagaatggtggaatcggggtgtaagggttgggggaagggaccccatatcttagaatggtggaattggggtgtaagggttagggaagggaccccatatcttagaatggtggaattggggtgtaagggttggggtgcccataggattccatcagcatctgtggtctccagccgtgtgtagcatttgttaggctgcagaacttgatggctttgaggtcacatcggggctggtgaagggagccccagggctagtctgggtctgtagttcctggcctttccctgggaagatggctccagacctttgtaggggtgtccaacagtgtgctggagttaaatgcagttatgctcctgcccactcagagttgcagttccttgagccttgctgtcagcaggatgggatgggctgacagggtagagaatgtacctgggctcagctggcccagactccaaaggccaccagaaaaccagggtgacaaatgcccatcattcaacgagtggataaagaaactgataaatacatacagtggaatactactcagccataaaaaggaatacattcatggcattcgcagcaacctggatgggattggagactattattctttttattttattttcttgagatggagtttttgctcttgtcacccaggctggagtgcaatggcgcgatctcaactcactgcaacctttgcttcccaggttcaagcaattcttctgcctcaacctcccaagtagctgggactacaggtgcccaccacgacacccggctaatttttgtatttttagcagagacggagtttcaccatattggccaggctgatctcgaactcctgacctcaggtgatccgcccacctcgcctcccaaagtgctgggattacaggtgtgagccaccatgcccagccactaaagtcatgtttctctcttctccattttgattcatttgcccaaacctttccatgccaaccagtgttggtttttattaattagtccacattttttctcatatgaaataagccaaataatgtcagggtcatcaccttgtggtggtgcacccagggtggccgtagctggtgctgggacccactggatcaggggtcctgaagccttcacaggtgggagcccagggcccagacagctcagtcagcaggcaggtaggttcagctaacctggtgctttagccctgcaagtatctcctgccaccaccctccaccctgggaggtggggtcacagtggggacctggggaaggaaggagtaaggggagtaaggccctggagttctgcttggtgctctgggcctccagtcagaacgggggataagcttgggccgtcatgtggactctccctggggaagggtccttcaccgtcccgtgtctgtgagacacgtccccggggaaggaggacactgttgctgccggctttgcaggcagttctgagtgtggtattcactagatgcgggatggcatgtgtttatgtctccatgtatgtttcaattagtgacaatgcctgggtttctgctcgactcagaagtctcagagccaggctcagtggctcaagcctgtaatgccggcgctttggaaggctgaggtggaaggatcacttgagccaggcattggagaccagcctaggcaacatagtgagacctcagtctctacaaaaaatttttaaaaattagccaagcttagtgacccaagcctgtagtcccagctgcttgagaggctgaggtgggaggatggcttgaacccaggaggctgagactgcagtgagctgtggttgcaccgttgcacgccagaccaggcaatagagtgagacccggtctcaaaaaaaacggcttcttaatcttttttgggtcagaagctgagaaccacagacctactatccaggaaaaaaagcactctcctaatcattctagagcacctcaacaatttgcattcaaattgctcccaatatcagggaggggctcttttttgttgttgttgttgtttttttttttttttttttttgagacaaagtctcgctgtgttcccccaggctggagtgcagtggcgccatctcggctcactgcaacctctgcctcccaggttcaagtgattctcctacctcagcctcccaggtagctgggacttcaggtgccccctaccacgcccagctaattttttgtatttttagtagagatgggatttcaccgtgttagccaggatggtctcaatctcctgacctcatgatccgcctgcctcggcctcccaaagtgctgggattacaggcgtgagccacggcgcccagacccagggagggagtttttggagccccagaagcccattcacaaagtcctctcggggccatagttctcaagtagtggtgtcactattattattttgtctgcacactgcacgcgataacatattcatcacacgtgcacactctcggtggggaacaccttgtgggcatggcataggacaagtgcagtgtgaacagttactggccgggagcccacagagctgagtcagtaatgcctggcctaatggcctaactggtcttagcttggaaagtcgatgcatgagagggatttctccttccccagacactgcctggcaccttgcctgggttgcacagaaggaaattagggaccgtggggtaaaggggggactgagcgtgatgcctggcttctctcagtattccttagttgcagtaattgcttaggaatgcctcctctcacccgagagaaccccatggctgtgctcagaggctggccgggaaggtaggcgaggccaccccgatgggagtgctggggccggccactccccagtccccacggcctggctgcttttgcggtcgcctagggaaggtggggaagcgaatgactcattatcccggcaattaatcacaccactgaggcatgtgatccgtgcaggacatgtgccacctgctgcccctctgtcctgttcagtgctgcttctctccccactctgaatgggaagtgcaaccccaggaaatgatcaccccctttccacaggcacggaattgtagctgcagcagcccaggaccaagagactgggacaaaagggtcattcgcctgtatatcccagggccacacaagacctccagggaccagggggaatgatcatggagaggagcatgtggacgcttaagccaaagatttccccatgtgggccgggcgcggtgcctcacgcctgtaatcccagcactttgagaggccgaggcgggcggatcacttgaggtcaggagttcgagaccagcctggccaacgtggcgaaaccccgtctctactaaaatacaaaaattagctgggcatggtggtgtgtgcctgtagtctcagctactcgggaggctgaggcgggagaatcacctgaaccacagaggtcagctctcagctgctgtgagctgagattccacgattgcactccagcctgggcatcagagtgggtccctgtctcaaaaataaaaataaaaaaaccttgacagacctcaatttccctgtctccacccacttctggggcagccttggatcgtctctccagtgcaccctcttcctgtccctgtcggggagaggtcctgctgaaagccagctcttagaggctagctgtagaactgtatctgaaccaacagggtgaggagtcaggaactgacctagacccagcacctcctgagagccagaccccgcatgggtgatttcacatcctccgtctcatgtgacatctcacactagccctcttcccatttcacagaggatacaactgagtctcagagcaagtgaccgtgccaagctcagactttgttctgtctgactgtctccagcacagctcactgtttccagtccgtgtgaaaaaaccacctccttctcccctcagtgtccctgcccccaaccagacacacctggacgtggcaaaaggggctcgggccgaggcttggagccctgggtcctcatcctggtggctctgccatgttgtgactgtgatcgagtttcttcccctctttgggcctttccctcctcacctgtaaaactgttagtttggcccaatcatgtagaagcttctccgccccacacacatacacactcctgtctttagagtctgtctgggcacagggcagctccctactgtctcctaccaagcccttcttttcttcctgcagggtctgtctgtggaaagtccagacagagactaagcctaaccctaaaccatgaatgaatggagggaagccctcctagcatggaaaagagaaatctctccctcagctgctgggctcatcagtccagcggccactgtcgggtccaagctctgcagtgacttcatcaatattttagctcctgcagagccctgttccttagcaaccgcatcctccgtgccctccagaaaggctcccgagtcgggtgttcctcacatccccgtcctgtaggtgctgtgccttgctgtcaggtttggagccactcatgccaccctgaatggggagctttggtcctcatgacccccaggggtgaggctgcatataggaggtgtgtgcgcaccaggcgagggagagggacagcttggcatgtcaaagctcttcgccccgggcaggagccgagggacggggaggggaattttggaaggaagccagggtatctccctggcctgcccttggcttgcccttaccccttgcctcaccacaggtatggggaagaggagcttttcttcctgctcccccgtctttcccaggctcagatgccgtttccctttgtggcctaggtgcagtggaggcttgcctcttgcatcagctgagacgccgtgccgctggcttcctgcgcagtgacaagatggcagccctgttcaccaaggtggggaagacgtgcccagtggcgggggagatttgccacaaggtacaggagctgcagcaacaagcagagggcaggtgagccctgggccagccccttcttccctcctttcagctcttcccacttggcaattgctacttcctaggacacccatcggaaagttggcatcctgggcctgttccttgcagggcctctgggtgagggatcagcttgagggaggggattggttccttgtgggcacaaggctctgtacccctccttcacctcccaaccccagtcagttctctgtgctcccatcttggggtaccaagccccactcccaatgccagcattctggggtttacccctagaccactgcactcctggagccctccccgcctttgcaggaaaccctcaggggtcagccaggaggccctgcggagacagggctcagccagcgggaaggccccggccctcagccctcaggccttgaaacacgtatgggtacgcacggcgctcatcgagaaagttctggacaaggtcgtgcaatacctggcggaaaactgcaggtgaccgccccgttccccaaaaactgcaggtgaccaccccgttccccccaaaactgcaggtgaccgccccgttccccaaaaactgcaggtgaccgccccgttccccaaaaactgcaggtgaccgccccgttccccccaaaactgcaggtgaccgccccgttcccaaaaactgcaggtgaccgccccgttccccaaaaactgcaggtgaccgccccgttccccaaaaactgcaggtgaccgccccgttccccaaaaactgcaggtgaccgcctcgttccccaagcagcccctcccttgacccgtctcccgacgtccctcagccccagccctcaggatgcttgcctgtccgtgacagcctgtaggcaaccctccatctccccgtccccttcggtgccctcaaggcattggccataccaggcacctcacgaagcccagtccctaaggactcactgtttcttgatgactgatctgaatctggtctttgtggggatgtccctacctggtgagcttgactgccctggaatgagccccggagcctcggcagtcacactgtctgtctcctggcagcaagtactacgagaaggaggcactgctggcagaccctgtgttcggcccgatcctggcctctcttctaggtgagcctgagagcacaggcacagtgggtacggggcaggtgctgagggagcatcgtctgggctggctgtctctgtctccacagtgggaccctgtgccttggaatacactaagctcaagacagccgatcactactggactgacccctctgctgatgagctggtccagcggcaccgcatccggggtccacctactcgccaggactcccctgcaaagcgcccagccctgggggtaggtgccccctccccaccctttgggctcatctgggctatgcccatgggcctgtagggacgggaaaccggcctctctacgggacaggccttggagatgccccaaggtagcggctgcctcagaagagccttctccgcacaataaaacttaacacaaatgccgggagcccatgctggtccgtggctggagagcagagggtggctgggagtaaaccggggcaggaaggacccctggggtcagctggagagggtcagcatggaagcgtgagggttcccaagccttgaggccagtttcccaaggctggaggctgagccccggccttccacacagatccggaaacggcactcaagcggcagcgcgtcggaggacaggctggctgcctgtgcccgcgagtgtgtggagtccctgcaccagaactcacggacgcggctgctctatggcaagaaccacgtgctggtgcagccggtaggaaagcttcatcctgccatccctccccgaaggtccccgaacgagacgactggaagcctctagccatggctattcctttcctgaggagcttgaccagagacgggggggagaatggccccagcctcccaactccctgtttcacacgactcacgcccagcctttagttggcaggggacaggaatggcagccagcaggcgaggggagtccgcagtgtgggtatggctggcctggaatggacctggcatccaggaggctggcaggagagagtcagtggcaccaggctgaccagggaaactgagtcctgttttcctgtgcttctgccccgtccctagtccaggaccccgtgactagcctagcttggcctcccctcctcccagcgggagctcatttctcataggccatccctgagagcctctcagcccttcatcgtcggtcttccggtgtctcccgctgtagaaggaggatatggaggcggtccctggctacctctccctgcaccagtctgcagagagcctgactctgaagtggacccccaaccagctcatgaatgggactctgggggactccgagctggaaaagaggtgggggctttgggactcaatcccaggagccagggcagggagtgggtttgacctcaggcagagggatggagaaaccccgcttgctccaggaggccaacctcactctttatttggacgccaagaatagcagggagcggctgcctggagtgattcccaagctctctaggacggagccaagcctggccgtgaagaggtttgtctgagccaagctctcagcggctgagacggacagctgtccatgtgccgagcgggcagcacagatctcaggggtcatggctggctgtgtgcacctcttggctatggtcatcctatcttcaggggagtttcgtggggtggtaggaccaggagacaaggaaggaaggaaggatggcaggtctttggacacagtgacagcagtctggttcctttctagcgtttactgggactatgccctcgtggtgcccttcagccaggtcgtgtgcatccactgccaccagcaaagtaagcctgccttgtcctcggctcgggtgggaagggagaggctgccttctgccagctgtgcactgtgcgtggggcctgtaagactcctcgtcctcctcccatccttgttaatggggctcccaggccatgctgtagcccagccatctgcctcctacccagcctgggggcactggccagcagggtgtgatagccgacgagagggcctcagccgcactctccacgttcacccccagagagcggtggcacgcttgtgctggtgagccaggatggcatccagaggccgccgctgcatttcccacagggaggacacctgctgtcctttctgtcctgtctggagaatgggctgctgcctcggggacagctagagcccccgctgtggacccagcaagggaaggtaactcgggtgggaggctttaggggaagggctgtgtgtggggttctctgcccgcctcccttccttccccacgtggagttcttaggagcggccttgtgtggaaccctggatgagactctgccctatacagcccgaccacctacccctccttccacaggggaaagtgttccccaagctacggaaacgaagcagcattcgctccgtggatatggaggagatgggcacggggcgggccaccgactatgtgttccggatcatctaccccggccacaggcacgagcacagtgagtgtcccgagcttcatcccgggggaggagaggaagacgctctgggaggcggggagcgcagcgtcacccaggagggcagcaggcagggcccactgaccaggccaggttaacaccagaggctcatcgcctagcctctcagctggaccttttacccacagatattgcctttgaaaaggtgcgtctcttctacccagctcccttccccacttctccacgccaggactcttggctcagcagacctaggcgtcactacacaagactcttagttatcctttcagaccctgtccaggggtaaaacacgtggagaaacgagaagtagaaggtggggaaccctccattgctcttcacctcctgctccccaacccctacaagacagcctgggtatgggaccagcgctactttttttttttttttttttttgagacgacgtctcgctcttttacccaggctggagtttaatggcgtgatctcagctcactgcaacctctgcccctgggttcaagcgatcctcctacctcagcctcctgagtagctgggattacaggcgcacacctccatgcccggctaatttttgtatttttagtagagatggggtttcaccatattggccaggctggtctcaaactcctgaccttgtgatctgcctgcctcagcctcccaaagtgctagggttacaggcgtgaccactgcgcccggcccagcgcttctttttggatggtgaatattgtctgctgactcccctagagccagagccctcctcaaaccaactactgatgagcgttagctgaagtagcaggttgcatcagaggcagactcggggctgcctgggggctttgggcactggcgggtagaaaggcggcttggcccttgtgggtcctgccccaccctggacacacacccctgggcccaagggggtctctctgtctatgtgcatctaccaacaccaaagttccctttctggtcagagtgctgctgctgcccataggcttctctgggcagacttgcttttcttacagataaggtcggggaatttgccagcccagagcgtttattgctaacaagaccacccgctccctaaatttccaacttgtgccaaaaagttgtcaacaagttgtctctgtattagggaccggactgcccagacggcacactcagccacagcacagatagctccaccaggctcagagggcacacggcacagggatgtccccccttcccagatgtacctgacaaagagacgcatctttggccagaatgtatttacacacttggcacttagtctcaggctgttgcttggtttagcttctccagtctctgcctcccctcttcgatctttgccatttcccagtcctggtcacttcacttccaggaccacctcgccaagggcaagccagggcacccagaggctgaaactccaccaagcgactccagctccttgaggacagctctgggaaaaccctttccttttcctgggagggaagaaggtggaatttatagtctgaaaaaggggatttggagtaatcttcagatttggtccagcctgagaggagctagagaacgatcaggacccatctgccagctgtcatgcgcagcctctgtgagggccgatgacctcctgggctgccagcccatcccagacagtcccggtctttcacatcctcccacctctgttctctctcttctgttcttcctagagaggctgcctccgaagagtgaggttctgcagctgccccagcccctcgcctccttccacactctcccaggaaaatcatccaaagagctttctggtcccctcccttcccctcttctgtgccctgcagattcacgatgaccccggcctccattccactccccttaaggagggagtccgtcctgcccagggatgagggcctcatgcctctgcctctcgctgttctctttgagcagtcactattaactaccaccacctagcggccagccgcgcggcctcggtggacgatgatgaggaagaggaggataaactgcacgcgatgctctcaatgatctgctcgcggaacctcacagctcccaatccgatgaaaggttcttatccctccctctccctgacccacctcatccccaccctccctcccgggcccgcctgccacccaccacaggggttcgaacggcagtgttggcattaggggacttgcacccagggcagttcccttccatcgggggcagatcagggagggcagaaggaggccagacaggtgctggcaagaaaaggggctggcccagggcaggtggctccaggctgtgaggaggaagaggatttgctaataggaaggtctgattatctgattgcctcctgggcaccctgaatggatctctgagcccattcctactccgggggtcaggctggcaaatgccagacagaggtctcttcctttctctctgctgattgggaagaccagcctctgggcctggtgcttctgactcctgacttaacagaaacaggatggaggtaccgggtccttcctggggcaggggcagcagctgtgggtcaggcgaggggttgagggctgccatgcgaagggccccagggctcagtcttcccaggaggcctgagggccccagccggcagggcctggtactttggcatgaaatctagaaatagctgcagcatggtgtccaggaaggggccaggctcagggcctggcaacatgaactcccgccccagatatgcccctggttcactgtgtggttttgagcaagtttctcactatcccggagctccgtctcttcacctgcgccagggatataagacagatgtgttcctgccctcatgagtctcagggtccacgaatggagaggtcacctttgttggaggtgatagcgtagtgccctcagcctctcagggttcctctgcctaccacccatctttcctagcacagagctggcttggtagagagggagcccccctcttttcagcaagcaatcagccaggcgacctgtgagggctgggatgggtgctccagaaaggggtgggtaggaagaggctgaggccagttctcccagagacgaggggagcttccccattcccacccattcccatgctacaaaatcaattgcttctccctttccccgcccctgcagaggatgtcctcagaatatgtcacactccccttaggcttccaaagttctgccgggaagcccagttccttagccggccactgatccagtaactgtctccgggcaggcaggacggcctggtctgtgttagaacacacccagcacaccctctgcacaagctgccagctgccctcctactgccaggcgcctgccctcatgcccaccctccctcccagcccttccaatatgagcccgtaggccaggcctaggtgggaacatcctacttctgatgtttattgcctacacacacccctgccatctggtttcttgcaaacctggacttggggctgttgcctatttacagtgaactgactgagcagtgtgggaaggttgagctctgaggggacccacggagctacttcttcccccacgaactggtagtcaggctagaggctggagggtcctagcagagcccttggcagactcggtgataaaaagcctatccctgactagtcttagggctgaggcctccgggatcagagaaacttccagacccacttccaggggtccagaggcctcagggctcatctgtgcatcctctcaaggaactcaggggctaggccaacctagtatagagcttctgggcccctaatacttgggaaaggagaggaggcataagagcagaatcagcaggcggttggggagagggctggggaatgggggccccccacctccactccagtccataatgacaacactgttgagtccgttctgccagctgttgcttttcaggcctgcaacatgcttgacttgtgcatgtgaatcagtggcggggtgtccaaatttcctctccctccctcttcctctccccttccttttcctgctgcctccccacagagcagatgctattcactctaattctgctccaggccaggcacctttcactcggagtcttaggggctgtggggttcgcccaccctgttttcttgctttacactttcctcatgctcagaggagagagtcagagtcaaagctgacccagcagacccccctccccccgtccagcctgtgccctcacccagtcacgccatagccccagctatctgcactgggctcgctcagagacagtgttcgaatgtggctggttcagctccttcctggaggattaaggtgaagagcattggcccaggagaccttggctgggcctcctttctgggcatgagcttggttccctttgcccacccccgccctcacccctgttgccctccctgcctgcccgcctgttgcctgctgcctgcctggctgggcctcttcccaccccggctcctcccgggactgtcctcttctctcctgcctgctgcaggggcctgagctgggctcctgccccactgcacctgcaccctccccttcttcccagagtctcaggcatggcttgcaacgccctcactcccagagccgcagcccctcctcaccacgcgtgttcccttaatttgcctcctggtggagctgaagggccagatatctgcaaaactcccggccgtgggtctgggaagagagccccggccaaggcagggcaaccgctgagggaaccggaaggggctcagctcagccctcctcaccaaggcacacccagagctggagtccagctcccaccaaagccaggcccacgcctgcggcaggccacagtgggccccggcccaggctgagccagccgagcaaactgctgctgacaggactccctcagcacacacggctctccatccctgttcttccgaactcttctccactctctccctccctcccggcatcaccccccagtgcttccacttcctctctcactttgcttcatgtctgtggctccctggacctgccagagtcccccttaagcagtgccctgccccacgtgggccgtggaagctctcgagggtcttgagttctgattcagaccgcctgggctggctgggcaggccctgtcgctggcagcgtagctgtgtctaaggagtcatcttctgaggctgcaactgggcctgttcttctctgtcacattggatagtgggcctctgtgcccagccaccactcccggccccgcagtggcctcgtagtcctgggacctgtgacttccatccagctccctggtgttttcgggaggccaccatgctaactgctgtcaggctaggcagggatggagcagagctcagaaaggggccataggagctgacagcaggggtacctggcctgggcacggggcactgctcatccgtagccactggccaccagatctagactcccccagaagagccaggcctacgggcaggtgactcagattcctcgggggctttgaacagtggggactccctggaggggagcgttcagagttggaagtattccaaagacctccttgagcatctcagagtttgccaagaggaccgagctgaatccgtgaaggctgagctagctggtggctttgaggagctcaggtctttgttccttctctttctttcccttccctctagaaaagcaagtgcttgctggtcgcaggatagagctaggcacaatcatccaagactcagtccaagcattttaccacatgcagaaggacgccttgcgcccctctccaggcttgctggaggctaggaagtgtcaggcgccctctctccctaccgtttccatctctgggctctggaccaggcaggccccacctctgtgattttccacccatgggtgacttgatgctgcagctctgggcacagaggtgggcatggtgcagggtgcctgggagagaaggtgtctcaggccctgaccatgccacccttcctgcccgcagacgctggtgacatgatcgagatgcagggctttgggcccagcctgccagcctggcacctggagcccctgtgcagtcagggctcctcctgcctctcctgctcctccagcagctccccacatgcaacccccagccactgtagctgcatccccgaccggtgagtgggcagcgctcggccccagcttcccgttagcgtgtccagccacgtgtgtgtccgtctgtccttaaaggccgtgtcacctgcacgacagggtggcctctagagtgggacagatctgggttcaaatttcacttttgctacccacgtgacttacaagttatggaattaccatgagcctctacgtttctgaacctcagtttcctcatctgtaaaatggggatgatgccacttgctgcctgcagtacttatgaggacagaatgagagagaacccaagtgaaggtccggagttgtgccggcacatcatgggctcagtgcccgtgagctccccttcccgatgtgcacacagaccctgctgacaggccgtccacctgaggacactcagcagccacctgccgtgtgccagggcagtgagtgaatggcttttatgggaggtgttctcttttacctttacttcgtcttccgtttattaatcctgatgatcctccgctgcctctctccatttttcacatgaggaaacgaagattcatgtaggtgaagttcgttgaccaagatccctgggtggttgggggccaggcgggggccccacagcactctgtccaggtggcaggcagggacagggcacccactgacggctgctgggctgcggctcctcctcctcgcaccctccccagtgccttacctgccccccaggacagagcctcctcccttctctctctcctcccaccagaggggccgcagcccctccctgctgagcccggttgttgccacaggttgccgctcaggctactgtgtgagagtatgaagaggcagatcgtgtcccgggccttctacggctgtgagtgtggggcgcgccgggctgtggcgggctgggggcgggcggccctgggtcccagcctcctgctgcccaccgctgcccaccgcagggctggcacactgccgccacctgtccacggtgcggacccacctgtcggcgctggtgcaccatagcgttatcccacctgaccggcccccgggggcctccgcgggcctcaccaaggacgtgtggagcaagtatcagaaggacaaaaaggtgccaaccctggggttccagggccacaggtcgaggggctggggcgggcaggagtgagggcttcagggtaaaatgtgccagtgggtgcggttgacaggccagggccgatgccacggagtgaccagggtcccggcagaatctcttgcagctgggcctggggctgacacgggaagggggctggactgggaagccgtcctgcctccacatcgccctgtgaccctggacaaagctttgcctctctccgggcgccatttcctgccccttaaggaaggagagcagaacgagatctcatcccactgtgagctggggcacgggaggacgtggccaccccaaagcaggccttgcctgggcttcagcagtcactacaggccccgccccagcccattctccgtgggatggggctcacccagctgggccacggtgactgtggaggctgcacagtcttgactccccgggtccctcagaactacaaagagctggagctgctgcggcaagtttactacggaggcatagagcacgagatccgcaaggacgtctggccctttctgcttggccactacaagttcggcatgagcaagaaggagatggagcaggtgaggggagcctgttcccatggggctgatgagatggggagctgggccaggggacgccagggaggggaccttggaagcctcagccccttcccagccggaaagaagcatggcagggcagctccaccgtccttaccctgaggcccgtcttgagtctgagactcaggacccaaggtccagtgcaggcccagctcctgaaggggagggcctggtgcacgcttcccccatggtcgtggtgtggtctgagtacaggtggacgcagtggtggcagcaaggtaccagcaggtgttggcagagtggaaggcctgcgaggtggtggtgaggcagcgggagcgggaggcccacccagccacacgcaccaagttctcctcaggcagcagcatcgacagccacgtgcagcgcctcatccaccgagactccaccatcagcaacgatgtgagccagacgggacctggagggttgggggtctcgggggccacccgcgttttatgcacagtggtcctgagcaccagcctgacctctgggaactggtggggccctgcgagaaaggcctaaggtgcctgtgtctcattttctccaactggaaatggctaactgtgcctctgctgcctacttctctgggtattgtaggaataaagtgagagagtgcattgtgctcagttttagccaactatagggaaagatggacttactgggatttagggaagccctcctccttgtagaaagacctcaaagctagcaacaggcagcgctgggttctagtcccagatccactactgacaagctgaatgtctctgggcaagcacttcccgtctctgggtctcagtttcccctctccacccatatcctctgactgcagaggcttcctgagatctgtgggcctgagaataggggagcccgtagagcagccccattggtgtcgactggcgagatccttcctccccgcgatgttgcctgtcactgtacagaactgactatggcaggcttgttcggagcacgggagggtagctctttctggcatcactcctgccttttgaacagcaagttctaaactgtgactgcctggcccaaccaacactgataagtttcaattttaaggacgctttattaatttttctttaaaattgcctctttagataatgtgtattcttgttactttactaaatccttaccaacattaacagaaaatgtaagttgaagtaagttaaatataactggctgggtgtgatggctcatgcctgtaattccaacactttgggaggcagaggtgggaggattgcttcagttcaagagtttgagaccagcctgggtaacatggcgaaaccctgtctttacaaaaaatgcaaacctttgccgcatgtgttggggtgcgcctgtagtcccagcttctcgggaggctgaggtggggggaccacctgagccatggaggttgaggctgcagtgagccgtgataccaccactgtactctagcctgggccatagagtgagacaccctgcctcagaaataaaataaaaaaaaagaaatagaacaaacaaggcacattgtcatttcccacgtgctttgttcttaatcccctatccaggaacacattctccctctctctggctttgggttttgtaaaaatctgtctgtgccagtgcccagctgctgagctcatggacagcagtagctcctcgctggcgtattagattgccacagaaccgtggccttacccagcacttcatgcttcctgcccaaagtagaaactacttttagcattgctttccctacgtggtgaaaacagagagagaaaaatcccaaacagtctctgtatgtgtctcttcttttcctcgtgccttgtccatggtggtggactgtatctaggaggcagaatgtttgcttttccttcctacatctccccaccttgcctgagggctaatggaactgactaggtgcttgctacagaacgttcctgtcttgtcctgctgaacactcagtactgaaaataaggcaaaacttgtttttcctaaaacctctaggcttctctccacccagccacaccaaaacactaaggccattctcccggtctcatgacttcaggcgtttctagaatgagactgagttcaaactggccattgagcgttcagccccctggctcccctacttcccttcagtagccacaggaagacctggggctgttccttcaagcagggctgaagacgtgtcttcatgtttggccagaggcttgtttctctccgcctggctggctgggtcagaagctggcttggtgccccgtggccacagtgttggaggctgtggtgggagagggggtgtgaagagttttgcattccagctcccttctggcccgaggaggcggtgggctgcgggaaggtgctggagtgcaggtggagccgccctgtgttcaccccccaggtgtttatctcagtggatgatctggaacccccggagccccaggaccctgaagattccagaccaaaacctgagcaggaagcaggacccgggactccgggcaccgccgtggtggagcagcagcattccgtggagttcgactctccagactcaggactgccctcctctcgcaattactccgtggcctcgggcatccagtcaagcctagatgaggggcagagcgtgggcttcgaagaggaggacggcggtggggaggaaggctccagtgggcccggccctgcagctcacactttgagggagccccaggatcccagccaggagaagcctcaggccggagaactggaggccggagaggagcttgcggctgtgtgtgcggctgcctacactgtgcgtacatgctccccaggctgttcccagccgccccagaggccctcctgacatcccagagctggggaagcgctggtggggtggaaggcggggcgccctgactgccctggaagggagttctgagcccatttctcagcatccccacaggactcgctctggtctctgggttccgttttgctgcatttcttggggcgtcacctcctgcccccagcctgggaagggctgcccggtctcatgcctgagggccctccactcttccagatagaattactggacactgtggccttaaacctgcaccgcatagacaaggatgtgcagaggtgtgaccgcaactactggtacttcacgccccccaacctcgagaggctcagagacgtcatgtgcaggtgccttgtggggcggggctcagggtgggaggcgggaccctgccgccagttactctgtgaagatgaggtccggaaggtgccctgctcctctctcctgctcctgaatcacacttggctccccctgcctggaacgcttttttcctgcacacccctcccccgcgcctcttcattcttaggggcctaccagacctccacttcagccacacctcttcaggaagctttccctcatccccgcacccccgccccacataccaagcgtgacggccttggctctccctaagtcggagtgccttgggggggacccgtgggttgttccccgttgtctccctgtggggggtgcacagtacatgccttagggtcgtggaaaggctgacttctgggcggcaggtggctctggaggacgtcttcccagggatcccgagggagggaagaatggggcacagccacagtgactctccccctgcctttcagctacgtgtgggagcacctggacgtgggctatgtgcagggcatgtgcgatctgctggcgcctctcctggtcaccctcgacaatggtgagggatggcgggacatgggactgggctgcgtaagctggagaaaggacgagagggtggccaggtctggaggggtgggaatgggagccggctctgtcccctgcgtctcctgccctgccagcttcactcctgtctcccctcagatcagctggcctacagctgcttcagccacctcatgaagaggatgagccagaacttccccaacgggggtgccatggacacccactttgccaacatgcgctccctcatccaggtgaggccggttgccacccatgggcatgggagcaggcagtgctgggctggtccatcgtccacatggctagggagcattccacaaacatacttgacatagaaacttaacttctttcattttaaaagacatggtttcagcagggcaacgtggctcaggcctgtcatcccagcaatttaggaggccgaggcaggcggatcacgaagtcaggagtttgagaccagcctggccaacatcgtgaaaccccatctctactaaaaatacaaaaattagccgggcgtggtggcacacacctgtagtcccagctactcgggaggctgaggcaggagaatcacttgaacccgggaggtggaggttgcagtgagccgagatcacaccactgcactccagcctgggtgacagagcgagactctgtctcaaaaaaaaaaaaaaaaaccatggtttcagcgttagaaattgaggaggagtgtgtgtgtgtgtgaatgctcgtgcccatgaaagttctggcgaacagtaggggttgctgatgacatcagacacccagaaaatcctataaccctaaaaataatgcagctcagagagatgggtgatgggaggggcagcaggagcaacccaccctccacaaggagatccgagggggagagagtgcaccgcgcagcacagggcaacagacagacccactgccaggttggggatcgcctgcatccctgggcgtgagcggacggtgagtggcggccagaggcagcatcggctcagggctcagcctctctcccttttcccacccacataagatcctggactcagagctgtttgagctgatgcatcagaatggagactacacccacttctacttctgttatcgctggttcctgctggattttaagagaggtaagaagtgggttggatcatggggctgaggtcagggacagtgagagatccctcttcccccaagccaacagttctcaatcctaactggaccttggaaccacctggggagctttaaaacctgccagaaccctggccccacccagcccagactcatgaactgtggctgcctgggcctatgggttcttaaatgctcgctgaccagacacagtggctcacgcctgtaaacccagcactttgggaagtcaaggtgagaggatcgcttgcacccaggatcttgagactagcctgggcaacatagcgagaccctgtctttaatttttaaaaaagaaagaaaaaatgaggctgggtgcggtggctcatgcctgtaatcccagcactttgggaggccaaggcaagcaaatcacttgaggtcaggggtttgaggccagcctggccaacatggtgaaactccgtctctactaaaaatacaaaaatcagccgggcatggtggcgggtgcctgtagtggaggcaaggttatggtgagctgagattgtgccactgcactccagcctgggcaacagagccagactgtgtctcaaaaaaaaaaaaagaaaagaaaagaaaaaattgaaaagaaaacaaaatttccataggtgattccgaagtgccactagggttgacagttacaactctcatagatcatagtttggggaacttttttcaaaccaaagcattcctgagcaccaagatgggaggcctgtgacagctgcccggctgaagtgcaggcagagtctgcaggaacccagtgtgcagaaattacccaagaaaaggatggggccttggtacggggtacagaacccccattcctgagccaggctctgtgtcatggagagaatcccacgactttggcccctgaagctctgatccctcacctggctccatttagaggcctgtgagcagccagtccggccagcatcagccccagccccagcctcagcctcagcctcagccccagcctcaatcccagcctcagcctcaatcccagcctcagccccagatatgcggctaggacgggtgagcagcagccgcttactctccgcagaactgctgtatgaggatgtgtttgctgtgtgggaggtgatctgggcagccaggcacatctcatcggagcactttgtcctgttcatcgccctcgccctggtggaggcctaccgagagatcatccgtgacaacaacatggacttcactgacatcatcaagtttttcaatggtacgagctggtccagccatccaggctgccctgagcagaggtgtggaggcccccacctctgccccgcacacagctggagggttctcaggaatcctgggggcccttccccaaaggccgggatgtcaagaatctagcagagcagatggaaacagagcagggtagtcagccacctcctagcctgctgccctttctctgggcctctctacagctcttcacgtttccccccagaacgtgctgagcatcacgatgcccaggagatcctgcggattgcccgggacctcgtccacaaggtgcagatgctcatagagaacaagtgagctggggccaggaggcagcagccgtgcagagcctgggctccggcagggagaggtgcaggggagtcaccgcccagacctccccagccaccaaccgaccccacctctgttcctaacaaagcggttgtgagcctggatccgactcccggcagtgctgaccctgcagggcaagtcaggggccaggatgccctcggatcagggccgggatgggaggggtcagcctcagggagcagctgccttgggggacacacctactctgctcccctctcacacatctgggagtagccccactgccacctgcagccgcagcctggactgctgcccacgagtgaacctggggccccacaggattaacaggggctatagcggcctgggccctactcagctggggtggcagagggcgagaggctctgtgctgtgtcccttctgagggtccctttgcagtcccagtatattgtgcgtgcaccagccccagctggagcaaccaaaactgcttctggtttaggcacacgtcacgggtgcgggagacccgggcacgggagacccgggccgccttcaggccgctcccccgagattctggggcagtcggaagatgtgggccctgggtgggagcagcccacttcagcagcactgccactgcctttggccacctgaggtgacccccaggcctccccggccttgtacagtgtacctctgtgtatctgtacagcctcgctcctgccaccccacccttgcgttctgcattaggtacttccctgaaaaccacgtgtaagaagtgatgcttttgccagtggatgatctggaatgcgaccggagcacttgctctgaggaatcccagggtgactctgtcggggaagaatccggtcacagcctcccctcagagacaggcctcagttcgagggcagcccattatctgtcgcagacatctgccatgtccctgagactgcgggaggcaggggatgcatgggtgtccccatctgtccctggtgagaagcaaggctagctctgccttccacatgcttctcaggatgccaagaggcctaggaacccagaaacccccttggaggagctgtgtatgcgggggtgccaggaagggcatagctcctgcccccaggcctaggcatgctgcttgctcggccatccccacttcctcctctaccccaacacatgcaggctaggccttgccctggaacatggaggccctgcccggggctggggcctagtccagcagccaccaaagtctggcagactttctgcatttgagaaacatgacaaagggccccgcagcccttctgcacccagcacagcctgcccagcccagccctgcccccgggcactgcacagcctgtctgggggccagaccaccccattgtccatccttgttgtccgtgagtccttggcctccaccaagcacgtgtggccattgtgtgcctgccttagtgactccgtggttttgtgaggagcagagtgtgtatgatttttgcctcagaaactatactcttctgtgtaacagaccaataaacaacatttgtcaacactggagcctctgggactggacactgagagaccacgtgccttctttaagctccacagtcggccagccccaaaaggcgaggacggcaaaaaactaaagtttccaagagaggtactccagccgccagtctggagggtgtgggctggtcaggaagtcagggtgatttgatagccaaacctcaagtactcagcgcccttgaggggacctcaccccagagtcatggccccatctcacgatgaccagtggcccctctagcctgtggatgagagaaggtccctgtcccatccctaccccctgcctgccctactgaccaggctgcaatgagaagctggagcttgactatgccactgcagctgatggcaacggagctgcccctgtgggtgtggctctcaccccgagcactgtctgagaggccggaggggagtgtcaggaggagtcagaccctgctgagctatagacaggcccagctgtaacgggtctgcacctctcttcctgcccttccccaacccgagtgctactggtcccatcgtcgatggctccagggagaagacaccagtcacacaacatgtcttctaccctagaggacactggcttcctggacattagggcctgttttccactcactcaaagctgaagaccccagcccatggtcctagcaggctgaacccagctttattatacagagagagagacagacagatagacagacacagagtcttgctatctctcccagaatggagtgcaatggtatgatcatggctcactgcagccttgaactcctaggctcaagcgatcctcccaactcagcctcccaagtagccagggatgcaggcccccatcatggcagtttttctatctttttggtagaggcagaggctcactgttgctcaggctagtcttgaactctggcctcaagcagtccacccacttggcctcccgaagtgctgggattacaggcttgagccactgcatctggccctgaacccagcttttaggaaagagtgcaaactagtggccagagctacccaaagaaaccagttggtgcagagagagctctggggccagggaacttgatgagcccttcaggggaacacccccgacccgccagccgactctgttgcctggaggagtcagaattcctttgctgtgaccacctaaaggaaatttcacctagcctgggagtaacccttcacacacttccgtcctgccctactccccctgactactggactgggatcctgggaccagaggggatcccacagcttttcaaaacgatgggacagctggggcgggaagagcaagcagcacagtgggctctccaaacaccatctcaaggaacctttgcaatctggaaagtcaggtcttcctcttacagagcaggagctggtaaatggaagcacctggattcatactttatcctgaccacaggcccctttcttataagctccagctgagccatgggtgagtgagaactgtgggtgagggggagctttgagtacagcttctgcctaaagatttagtgacagccctcagatgacagccaagttatcactgcctggggagggtcttcatctgtgttcccagtgggcacagggcctggcactgagcatgcacccaggaagggttaaccctcaccctatcccttccctaaagcgtcgcttagtgagctaatggaagtgacccagctcttccaggagctaccagcagagggagcccgcgtctcacaagtaaaaagggcaggctcagtagggagggctggattccgaactttcattttaattaaaaaaattttttttgagacagagtctcgctctgtctcccaggctggagtgcagtggcgcaatctcggctcactgcagcctccaccccccgggttcaagtgattctcctgcctcagcctcctgagtagctgggatcataggcatgcaccaccatgcccggctcatttttgtatttttagtagagaagggtttttgccatgttggccaggctggtctcgaactccagacctcaggtgatctgcccacctaagcctcccgaagtgctgggattacaggcgtgtgccaccgtgcccggcctgaactttttgaagtcaactcttctctttcagaaaacaggacccaagacagcactcccttcctcaaggataacccctacccaccccacctcaggaagagacgcagagtcagtctcccctgtggggactgggagtcagtcaggtactgtcagggtggaaatgagaagctgggcccccttgcccagcctggtctccagcaaggcctagctagtggctccctgacctcacttcccacaccacctcctcccatgacagcctgcccagggagagaagacacagccacagggacaaggggcttccagcccagctgagaacacggctctttgcccctgacctccagcctcttcttccccttgttcctttcccttagaggacagctttatggactccccggctgacctgttgtaactgcacccccagagcagcccctcaggaagctctcaccctctgtgcccaatccctggggcaactcccctgtaccttttttattggatccgagtctaggactggccccaggtgccacaagggtggcagatgctgggtaagaactctgtacccagttcagaggtctgactgcagctccaacgaagtctccagctagccgtgtggcctcaacaagtcactgggccacctcaatcctgtttccttatctgccaaaatggggctaagtctggcttatttacttcacttggctgttgaaagatgaaacaagataatgcttgtaaaatggtctgaggaaatacgaagctttgcaaaagtttcagaccgaccagaactgccattttcagagcggcggaggcaccgggtcagagccgcttgaggactatgctgggcagacagggtcgagacaggtgatctcaccgctcctgccacatgcttccctacaggcctcagcctccttttgcaataaaatgacccagatgctgcaggctggcagctccatctcaggtttcagtgcaggtttatttcagttttatattttattccaggcaagtgcttattacatggatagtattcatgtctcggtaactaaagtcttggagcatgaacagccactagaatacagttcaatagtaaaaatacagtatgtacaaaattagggtttttgtagtttttttttttttccacacagcagatgtatccaaacacataaaaatctctacagtctggggtcgctacagtttatatttcaggaaacagagacacagtggccgagtcctcactgtaaacaagggccacctctgggggttgggggtgggaccctgggatggggggagaagcagctgtttctggagagagaaggggtcatggtggccccccagttaccctccaggcattccctgccttctttggccccccaaggaaccaacctccccctctccccgaggtaaggactcccagccagtgagccactctgaacatcaaaaggtaaaacacgcatgagaggtaagatgtgtgcgtgtgcgtgcgtgtgtgtgtgtgtgtgtgtgtgtgtgtgtcccaggctggaagggctagggagggagggccaggcggtcccacagggtgaggacagatgtggtcccgacagcactctgggggagacgcccaaggaagggctgggtggtgactgcccacttgggcacacagcatcacagcgttcacaaacgacaagaaaaacagcaacacccatcgtcaccaatctggacatagtcattcggcactagatttgcaggcccccgatgctgggggacagggacggggaggggcagcgggtggatgatgaggtatctgtgcaggcccgggggccactggcctcaggatgcagggagaggtgggcaggctgaggggaggggcgagctccacgaggctgctctaactgccccgtgggtcaggcctgccatcgctgtcacaatgggaatagcaaagctggctctcccagagccacggggtctggcggaggtggctgtgctggggtgggtacagggctcagcctctgaggatggtgacctggtttgtaactgtccctttacccacaccaggagagagaaataaggaacagtcccctgggaggtgtccaggaccaggagggaacaggaagggaatttttaggcatctaaggattctttatttccagagaaaatctattcaagacctttgctgacctcctctgtgcctgcagggcactccaggaaatcctcagctctgtcccctccccccggccccctcgccggcccaggcccctgccccagcccatcagtgtgagcttcacatccagggacaccggcttcctcccgctacactgaaaggccactggtgagtgtgtgtccaggtggggagccgagcgtgtctgacacaaagccacttgtaataaacacccacatacaaggaaaggccaaagcaggctgcccagaggcagagaaagccgcatcctaacacagagcccctgactcctcccccttccacgctcagccctgtccttgacccaaccaaggacctcttctcagagaaaggtgctgctgctctgcagctccccgggcagggcccactcaaaagcgtccccgggagaagcagggtgttgaggggatgggaggacagaggcaaaggggctggagcagaagcagcagccctagctctggccctctgttctgtataggtcccagggttggtctggggacaggcttagggcttggctaagccgctgggtttttaccttcctgatgtctcaacgatgtggcttctatgctcctggaaacaagaccagatgctggtccatgtctcccaaactgcaggaggcacccaaacccacaggccgccaggcccacctgtcccttggagcagtgcccagcactcagcagaggtcagagatcaggggctgaacgcaggacagcgcccctctttgctgccttctggaagccaagagccaagcccagggctggggactggggactggggacaggggcccagtggctctcctcccatccagacccaggctgcaggggacggggaaggggaaggacagccaagtccctccttccccacctcagcctgccctcctgaggtccagagcccagtggcagggattggggtgagggcacaggaagcttggcagtggctgggtttggtttattgttggtagagaatcattttaagtagtatctacggtaacgaatcacagtgactgcaaccgggtcagagagccccaggctgaggccccacctgtccgggtgggactccagaccagccacttcctatgatctgtcacctgtgctcagagcaaggccccttatcaccccaatccgcagctttctgggccaagtggcttcagttctgctttccccatttcccctccaaaggcctgggaagagaacatgaggctccggaggaaagccgggggcctgggccacctcaccagacagcaatagcagcagcagcacacgaaggcggggcagggcgggggagaagtcagggagcgtgacgtccacatcgcactgatttccgagggtagggaggggaagcaggagcggcactggagctggcactgggccggacaggtggcacattccatcagagtctcgcattttctcagagtcatcttaccaagtcctagtgcagcagggtggcccttccctcccttggctcagagtctttgcacccccttcccctaggaggcctgggggtgggtgggggggctggcctgggcctggctggaatgtgtggagctggtgggtgagagagtgggggacaggtccccctccctgtccccactgggggcctctgagtggcctcgtcctcaagccagcttgagtgtgctgactgggaaggagggcatggtgaccatggtcacagggttgagcacggtctggcccaccagctgggggtggtgcaccacctgagcccccacggccggctttgccatgacagtagccgggggccccaggccggccgtgccgttgacttgctggtgcgagagggtgtgggcgatgtggctcactgccacgggctgcgggtacaagggcagctgggagcccaggtgggccacatggttgagggtggcagggtgcacagtgatgtgcccaatggggggtgtggcaggcgccagttgcaccgcagggctgggggccgagggggcgatgtgggcgatgtgcttgccgcctggcccctgcagaacgtggttcacagtctggatgactgaagcgtgagtggtggctgtgtgggcgatgaccgtggagccacccccagccgtcgccaccagatgggctggagctggcaccagtgtctgggcaggggcagccggtgggggaggaggggctggcagaggggtcttctgctgtggctgctgctgctgcacggggaggtgggcaggaggtagggccacggagtgggggtgagggtgtgggtgtggaggcagaggcgcaggggtggtgctggggggtggcagggtggacttcagcagctccggctggggacgatggctcagcttaggtgggcccaggcccgcccggtcctcctccatatcctcgtctatgttgtcctcaccctctgtggggaacatggggcagggagcaggtcagaagggcggggaagcaagtggctggaggcgtagatgctcgtgggggcgtgggaatgtgatggggctggggccagggccatcttttctagcaggcaagaaagagcctggccagggaggctggaatttgaggtgtaacatctgagggctggggggccagcgtgggggctggggctcaccagaggcggtggaggtggaggcctggtcatcctcgggctggcccgtctgccgcagcacgcggtcaatctccagtacgtccatccactggctcagctcgtgcttgagctctgccagccgctgctgcgtggcaatcttctcacgtgccagccgctccatttcatgctcatattccttctccttcctcttcagggactggcacacagagtaagggacagcaggacaccctgagcagcagccttggggcccaaagcccccacaaacctctccctatcagctggcccacagaggcaagtccgtggcaaccagcgggcccagcctgacgggggctgctggagaccgcacctgttgtggtccatgcccctgcccagtgaggcccagcgtcccaaggagtgtgggctcttgggacaggcaccactgaagcaagctcaaccaggtgtgcaggtccttccctgtcctccacaattcatcctcaggggcttctccgcctctcgccccatccctcctccagcagcctcttcactttgcacacttctgccgcgagctaccctctaaggaacctgatcctgcgcttccacctcaccgttcacttgtctccctggtaacatcaacatccttgcacgatgagccactaggcagtgacacgccctcgccccatctcatctccaggactcgcctccctcctggctgctggtctgcacctgctccccgaccccctaggcgactctccactgtgcccgcctgtgacgcttctcgacgaggctccatttacatgctgctccccatcaccctgcccactcccctccagactccctgggctgaacaacccccaagcctaggaacgtgccccctgtacttgggctaaaccgatccatgagaaatggctgttgcgtcccatgacccagctcccctccacactcagtctttcccgtgctccaacccgacacttcatcaatcccaccctttcaagtctcacagacctccctgctggcagcttttcgcccaggcacgtcatgaccaatgtgtccaccaggcaacgccgacacgtgtccttgctgcctcccgagtccctttcttggcctgctctcgagctcctagcttcccaggcttactggtcatgtccaggtgcagggcccgcaggcttttcacacacacaactcaccagcccgccttggttttcctctctgaaccccgtctgccctcatcacacacagatcctcctccctttaccccctagatcttatctgcccgtgctccaagaccacatctcagcccctacctcccccactgtccttctgtctgccacatcctcctgcctccaagcccttccaggcaccgcaccgtttttttcgaggctggtttggatttggggtgggttttggttatattcccctcccccactctccctcaattttttttttttactgtttgtttttttccaacagagtttcgctcttgttgcccaggctggagtgcagtggcatgatcttggctcactgcaatctctgcctcccaggttcaagcgattctcctgcctcagcctcctgagcagctgggattacaggcatgtgccaccacacccggctaattttatatttgtagtagagacagggtttctccatgttggtcaggctggtctcgaattcccgacctcaggtgatctgcccgccttggcttccgaaagtgctgggattacaggcatgagccaccgcgcccggcctactagtgttttatctttgattctctgtcagccctcacccctggttcttgcctttcttgatcaacaccttttcttgcctctgtccccttctctccctgtatctctcactcccctccaacctgggggacagtggtgtggaggaggaaccataggcctgagagtccatctgcactccttcctggagcccagaggcaggagaagggggtggtgtctccagccccctggcactgaggaaaaatggggctcttctcactccacccttcccttcctaccctgcaccaggactgggccacttctgggtggggcggtgggtcacagattggctcacactgagaatgtaagaactgcaaacaaaatttctattaagttttctgtctcaaaaaaaaaaagcgggagggtgaagaaaagagccccatctgcctgggcagtaaatacgaggctgaaagataggacttcatcaggaaccggctcatacaaagtctctcacatacatgttttgtctttccgcctcaacacacactgtccctgtccgagctgtgaatgaaagtgagaatggctgcatagtccgtttagatcccagagcccacaggcggccaggaagagctacgcgcagggtgcttactcagccccaggggaaggacctggaagagtgctgtcccgactcctggtgaccatgttccttcccacctctgtcctgtctcttccctgcatcgcagggagaatcacagtaacccattagacccaggtttcccttctttcatcccctagggcgggggaccccaaaccccaggtactggtccgtggcctgtcaggaacagggccgcatgcaggaagtgagcagcgatggcgctctgatcctgtcacatcagtgggacatttggttctcacagaagcagaagccctcctgtgaactgtgcacaccaggagtgtaggttttgtgtgctccttaggagagtttgactaatgcctgatgatgggagatggaacacttccatcccgaaaccagccccgccctccctctccatggaaaaatggtcttccaggaaaatactccctgttgccaaaaaggttggggatcgctgcactaggagcagttttgctgttttgtagcagcttttcctgaccaggcctggcaaagtctccaaccccacccaccagtgaggccagcttcccacacccactcctgcatacatttctgccctcaccagtgacagatgtctctaaccattagtgccggcaacacataacccaggtagaaccgtgctctgtactggcctgaaacctggcagcttgacacttctgttgccagtcccaggccacacacagccctccctcattctggctttaacagtttctccccattttctgctaggaagacagtaggaaactcccttgcccctacacacacacctgtgtggcttttctttttttggagacagagtcccgctctgtcacccaggctggagtgcagtggcatgatctcggctcactgcaacctccgcctcccgggttcaagcgattctcctgcctcagcctcccgagtagctgggactacaggcatgtgccaccaggcaggactaatttttgtatttttagtagagacgggattttgccatgttggccaggatggtcttgaactcctgacctcaggtgatccacctgcctcggcctcccaaagtgctgggattacaggcgtgagccatcgcgcccagcctgtgtgtggcttttcacctggctctgaggctctaacaaggggccctaggtgagtcagctctcacttgaaccttgctgctgggggctggaagcagcagtcctgaactcaacccacctgtgggtaggatatagttctgggccagggagtgacatgggtcaaaagcttcttcttctcacctagtccagttcttcacaggcctacagacccctgcaaggtttccccagggtctaactttaacccacattgcttcaatctaaacccatttcctttctgtgactacctggatgcacggtttggtacctatttttcttgtctctgtccactttactgtggctgtcttcaaacctttgaccacctccaagccactccgtattctggctggggaccactgccttcttcctgcagcttcctgctctcagcaaacaaccaaagctcccagtctacacagccccactggtctctccaggaccagctcttgattctgcctgtctctgagtgacagcctcctgaccatgtttgtgtttgttcttagagacggaggtcgcactctgtggcccaggctgtcctcgaactccctgggctcaagcgctcttactgccttggcctcccgagtagcgtagctgggactcaggtgcaagccaccgtgcctcacttttatttccaaaaagcatcctgttccctcctgctggagaaactgggctgcccctgggctcttggcctccactttgctccgtgccacccagacttatcctgcaggtctcagctcaaaggtcctttcctcaggaacagctatcctccctccccagaacagatcccgccgcccggtccctattatgcccatacggccgccttctgtagaatgacttgttcgtcatctgccacaagacccaggcttttttacttgctcgccaccattcgcccagaagcagagacttcgctaaaagcacctcaatgaataaatgaataaatggtttgtagacaggcctttgaggttcctgcttctgtgaccagcaccagaatgggtgtcccttctgcacagcctgagtgaggcctaccccggctcctacttcaccgggcccagctcctcaagagcttccttctgcggctgctgctgagtcttcttccgattcatttccaaacccacacgttacgcaaggcgccctctgcaagtagtatctgcaaagaggaactcgccatgccgtccttcctatttctcaaaaataatagctaagcaaatgtcgggagtgcagcgaagtgtctgcatgaacaccctcagccagccctgcgactaaactacaaccaagcccaggttctgcaaaacgattccagaaataagccaccggcctgccgcggcctccggagccctctcccgctcggcgccccgaggccccaccccgaagcacgcgcgcacccacgcggccgcggcttccctgcgtcaccctcgccggctgcaccgccctccgcgactcgagagcaccgcccccgcccgctgcagccaatccgcgagcccggccccgcccctcccggctgcccggaagcggcctggaggcgcgccagccccgccccctggccgggagggcgggcggaagggcgcgttggcgggaggctgggagagagctgcccccctggagcagtcgcgaagcagcgcctcagcccctccctcagcaagtcaggctccggttacctcagggctgtgaccccgcggtcgaggccgggggaggggcggcgcccagcggctggctcctcgcgcgctggaccctcctcgccacccctcccacggggcccgtgacgccgcgccgcccccggagcttcctcagaggatggacagggagagtcccggctcgccgcccaccccccccccaacgcgggctgggagccccacgtccctccatcccctacggctccgcgtctccgcggctgccggcccatcccccacagcctccggcccggcgcgcggaagccccgccggtttccagggaaaccgaagctcaggccgccatggcaaccgcctgacgtggcggcgcccccggcccgagcactgcagagggagcgacgcccaaagggaggggacgcgcagccgggagggccccgaaaaaagagacaccccctcttcctagcccaggaggaaggaaagcgtgacgtgtttcaggctcggcggccccggggctgtttgccgcccagtcaaatcggagttttccccgccccaggcgtaaccccacactcgggccgtggcgcctccacgcgcgctccgaaaagaccttcctcctttggggtaaacggggctcggcccgcgccgcagcgtggacggggaccacgcccaaccctccccgcagatagctacagacattcgggcggaatctgggctcccgcccaggctctgcggccggggaggaggcgccgggccgccccatgcccttccctcccgcggctgcaccaacacgcgcgaacgggagccgccatcgggactcgcaccaggcgtcacggcgcgcgcctcacggccccggggacgccgaggctgcaggggctcgggagcggcgcgggaggggagccgcgccctcctctgcgcacgcgcgccctcccgggcagggagccccgctgacgtcagccgggccatgtgctcagcgcccgcgtggaggtgggagggaggcgcgggggagccgccggggcgtgagggcggggcggggcgcggccgggggaggggcggcggagggagggcgggggaagctgcgcgacgccggcctccgggccccatacctggatgtaccgcagcgccgtccgcagcacgctcagattggacgtcttcttgtcatccacgttggggatgttccgcttcagggtctcaaagcactctttcagatgggccctcctgaagagaggggcgagcgccggtcagcggtgcctggggcggggctgggacggggggaggcaggaccggggaagctggggccgagggccgccggggcccgggtcgcgcgcgcacgcacgcacgcacacacacacacacacacacacacacctgttcttctccaatttgttgtggacttctctggttccgatcctgaaacccagacagataggaggctcagggaggaggactcgattagacggccttcctgaccagcgccgccacccgcaaaattgccacaggctgtttgtccccaacactgtcttaaagcagactgggagacgttcgccctgtgccatgctgcgcccaccccctggaggacacatctgtgctcataatcacaactcctgtcaccctccgtcccaccaggagggagacaggaggactcctgggactcagaggcagccggttgaccccagccctcacccaagaggcccatactctgtccagaggcctgggaatgccataagcctcagccttggactgcgttaggaaacacagaagcctgggaacggggggcaatgggacattccttcccaggatagacatgggcacagtgatgacgtgttcaaatacagggggcacttctaagctggggagggcaccttgtcttgcacacagcccgggggatgggcacctctcctatcccccaccagcccgaccccgccacaccccactcaccccccgggcctcttcttctgttcactggatttgacttcttcagctggtgccaacttcagggtccccagcgtgggtgggggcggctgctggggggccagctgaggctggactccagggtgtggcgctatggtcaggacaggcgtggggaggggctgcaaaggcttggggctgccattgggtggaatggtggccttcgagtccggcagtaggggagcaggggtgggcacctgcggcctgctgggcaggggggcaggctccttaatgctgagtccgggggcgccaaccagggccggctgacgaggcgccaggggcagaggctgggctgccgcgggcaagggtgggggtgggggtagaggctgaggggagttggtcaccacagggatagggatgacagtcagtggggcaggggtggcaagtggtggtgggggtgccggcgggggagccggtggagacagaggcaggggtggcgcctccatgcggggttcctccacaggaagggtatgtgccagcctggccaggctattggccttcttctgttcctgctctcgctcctgctccaagcgaagccgctcctgctcctctacacagagagaacacaagggggggagggtctcagcggggccccagaactccagccctaactcgtcctctgaccctagcccagtcagtactcagtgacacccctgctcagcgagagacaccacaaatagcctaccagcccagccaggcacgggggaaagtgccgggggcacagcagtgaacaaatcaagcagacctgttccccgccaccagggaatagtaggacagtcacgggggctgacagtcacgggggctgacagtccgggctgcgggcaggacaggcggccctggaaaggtggagcagagctgtcagagggtgctgcaggccacctgccagcctgcagggtgaggaggaaggcgggtgagggcagcgagggtcaggggaccacagggccgaggtgggagaggcgggcagaggcccagccacccaagacttcacaccagaggggggggtgtgctgacagatcccagcttccgtggaaggcctttaacaatgtttaccaagcactttctagagggcaggcagtgcctgcatggcacagatgaagtcagtgaagctcagggagcaaagtgattcgctgcaggtcccacagcaagcctcctgacccctggaggacgcttgccgtgctcacaaggaagtgctgacagtccctggatcctcacaagagccccacgtcacatcatgggcaggacagggacatcaccctcatttcacacatgtggaaacagcccagcactcttgactccgaggctaggtcccaatgcctgttttcctcagggaccattcaacaaacacacttcgtccctctctgacccttctcgtgttataactcattttccccaaatccccaacatccccaccaccagcagcagcgccagcatgtcctgtccttcaggcctaaagcatcctctgacatcctcagtgacaccccgctcagcctgagacaatacaaatacccaaccactccagccaggcaccggggaaagtgcacctgcctggttctgggtgagagagggcagttgaggaggaggaggtacagcagcgaccatttctcccaaacaagaaggggctgggctcttcaatgggggctgagcagggcagtgcaccccaccacccgctcagcatccctgctgaaagcccagcaggaaggcaaggcccactcaggagctggctgccaacaggggaaggggaggcacctccatctcccgcttgcctcgtcctctcccaggcgccaccattctggttccctggctacggggctggcccaggcccttggagtctgcagactccaggccagggagccgccgggacaagcagccctctcctctgaccccggacgcccgccccgctccgctgacgaacgcagcagacagcccgggctcgtggacacgccccaaacacccgggcaaggggtggcgtgggggactggagtcggctaaggccccctggggaggagagcacccacctcccacactcttactggctcaggcgccccagaaaacctgaggcctcaggccctttggccaatcaacaactggagtgtgagccaggcctgctcccagccccgccctcctgcagagggaagaggccgaggaggaagcggagggggaagcgtcctgggaggggaagcctcagtggtttcccagcagccggagttcaggggctgggccagccagcgggcctcttccagatctccctagcccttcgggaaggggcgatgccaggccggtgcaggcctgctccagtgcggggaggccttaggttacgcccgggagaaaaccagccctgcgctcccgcttcccacagaccgcagtggccaagcagcctgctgagttccagtgacagggcccttctcagtcgggcacagcctcagttgtccccagccccttcccctaccccaagacaaggctctggatcccagggcctaacacagaccctgcctccattcctttggctgacacagacctaacttttcattggccttgagacatggactccactctttataggcagaggaacaatcagggccctccctgagtcacaaggacatgtgggaccctagagtgcaagccaacccccattccccatattttaaagcaatcccaaagctcacctgggaggtagcaacctccttctcacctgccctctctcacccagaaccacgccggtacacctcacaggtgccaggaaggacccagttacacctggagcagcatgaaaaagctccacaggtggtgaggaagaggagctgcccctggccagatccagcccaccggagcttcctgtcccttcccacccagcggcaaccctctccctgtgcactggagaaccaccaaactggtggtggctggtgctccctcaggagcaccctgcgcttaggctctttaaaagaatgttctgcacatccaccagacagggtgcgccccctcacatgcttccctgggctccacccagaggctgcccccaaagaatttagcatgcccctctgcagtgacccaggggccaaggcttccgcccacagtcaagagcagagccagcgtgctcccttcaaccttcccaagtgactgtggcccaggtgctctgcaggcacagggctaggggtggaggagtccacactggtgggccccagcagccacaggaattctcccatctgcacgctaaacaggaggcttggtgcctaaggcaggcccagggtaagccttggagagttggtcaggagcctctggacactccaaccaactccctcgaaacaaggcagaagagttgcatctgagccacctctatgaacactagaaatgaccaggccaggccttccgtctgggcaccaggatagctctgccctttcccctctctctcacaggcacacacatctgcggggtcctcatgtgagcaaactggctggtctaggtcagaaacccatgcttgcggttgaaagggagaaaggacaagaggatccctgtccagagctggtcctaggtcccgggaaagcgttctggtcagcaggttcacctgccatgcccttccttccattcgtcctgccccagctcagaggacagaacctcaagagggagaagaaaatgaattctggaggagaaactgctgggatcggttccggacacccgtacatgagtttttgagtagatctagctttccgcacccactcatctacaaagacctctgaccggcacacagaagtcgtgaccaggccgctgaactcggcctaaacacagtgcgtactcgaactgcaacgtgttgatggcggcagcaggtgacttaatctctccgaaccttgtgcacggtcttcccctgacccctgtgcccaaacgtaggacattcttggtcaccaggggcactctccactgccagaccctgctctggaccatcaaggcaacagccggggagtgtgggcgatgtccccgcccatcacttctgcaaaacccaggcatctgagcctcacatatctccagtgactcttgaccttgagaggccggtcgccccgactaggccgccggccccgcagctcccccgccccttgcccgctgccgctccccccttcccccacccccgcccgccgcggcggcggcacacggcggcgcgcgcgcacacaacacactactacctcctgcatgactcatcattgaagcaacaataggcagagagaaaggaaaggagggcgaagcactctccaacacaaccaaccctgccgggggattctggggggcggggagggcacaggagtccccgggtcctgcacacacaccgttccagagccgaggccctggcagcaccctggaaaagggaggtctttcccgccagcccctctgcagcaccctgaagccagggaccaccaacagggcgcgtgaagataggagtcattagtctcttccctttcgagggagcgccgaagtttgccctttctcatcctggctcattccagcgtggccccggctgatgccagggggcatagttggaacgttttgggggtcagtggaaaaatgtgagctctaaatgtctcgtcgccctgcgattctgagggtttcccttgcctcgggatcaaacacaggaggttaggggccagagccgacaggtgagctcggctcctccctcgcagggcaaaggctctccctgggaggtgcccagaggccggggcccgggcccaggcccaacccagcgcaaggccccttgccagccccgcccaggccccgcccccggccgagcgcgaggcggtgaggaggggccgggccgcgccgtccccagcaggagtgtccccggtgcacgtggtcgggggcggagcccgtccacgtcaccacccggtgtaaccaacgggctcggaacgcaggcacacgcaacattccaggcgagagcgggtttggaacgcgcagacacgccacattccacactggctaaagcggggcgcagcgaggggggcccgggggctgacccccagcgacccgcgggccatttcgcaaacgcccaattagcccggctttcacccaaaccccggacgcgcagcccagcccagctctgggaggcggggtcaggcggggctggccaggatcataagacacgcgatgtcatttcattctgcaaaggccgcctccgccccaagcggcgcgtagatctgccgggagcgccccccgcaccctccccacggggccagggaagccgaagagctgctccgcgtagagtagtccccacccccactccgttacacacacgcccactcgtgtgctatacacacgcccgtgtacacgtccgttcatctgctcttcccgaggctcacatcacacatcccccgtgcacacacgcacgcacacgcgagcctgccacccccacgcaacaccattcctcaccccaccccccggctcacacatcctcagtgccaccgagggctccgctggcccacgcaaaagcagcccaccacagaaggggcacaggggtgccacgcagccggggtggcgcccgcaggagccaggtccctcgcagcatgttaatgaattcattaattaatttcactgcccacatcacccctccccaggcggcggctctcgcggggagccgtgcgctgccaggctccgcaggccgcccgggagggggccctgtccgcggtttcgcgtgggttcggggaccggggtcactcgcttccccttccccagtgccccaggggcccagcccggccgctcaccacgtgctctctgttgttgctgcgcttgccattccaggaagcgggccgcctccagtagcgtctctatgctcatcgcgccgagagctgccgggggcgcgccggggccgaggctgcggcccgcgagccgggcacaggtcaggctggcgggcaggcaggagggagggatcacctccggggggcgacagggctgggcggcgcagcgcactccgcagggaagaacgggggagcacggggagaaaaatcaatgtctctcaaaatatttgcaaaatataaaattgcaaatttaaaaaaatgggatgcaaaaaaaaaaaaaaggcggcactgcctcccttcttcccctccctctctacctcccttccgatgcctcccgccccgcggcccccgggagtcccgccgacaagaaagggctttgcaacaagatggcgaggaggcaccgacacacacaacaagggaaggagccgcgctgcccccggccgccgcccccgctactacaccggggccacagccaaagcccggaccggagcccccgcccgcagggccgcggcgtctcgcgaagggaggggcgggtcctgcgctgctggccccgccccccggatccggcgcgcgcacacgtggcccgggcagggagggagaggtccgagcggggtgtgcgcgccgcggttccgctttcctgctggccccgccccggctgcaagccacaagttgggccggggcggtgcgtttgggtcgttcacgacgaaatctgtcctgctggagggagggtagggtgaacaattcaagatttaacagagttccaaccaggatattccgggtcagggaaaccttgggaatggcagagactggcctgaccctgggtctccacgctccacccactcgcgacctaaatcccgcaatcgccgggctgtcgcaattcccccgggatccgcccctgggcggagctgccggcgactggagactgtcaagagaaccagcggagggagcggagcggcagtccggctccgcgttttgtctccgttcctccccccgcagtgcgttcgcatcctattaggggacgtcaccgggccgcgagccaatgggcgggcaggacaacacggcatggagcagctccacatggacaccccgcgccgccagccttcggtttaaagggccagtgtctgcaggtcacattcgcgggtgcggatggggccactgggcgaacccagggtgggatgccgtaaggggaatcccgcagtcgtgccctggcctctccattccttttcaccaccttccatttaaaaccaggcctttatctttccttcccctgaactccagtctttgtccacgcgtattcgatgtgggtggagatacggactgtgccaccccatgggccaccctttcctctggggccggggccagggcggggaacacgaagcgcccgcagcccagaccggggggcgtggcccaaatcgggaacaacaacgtggagggcggaagcccggccctccccgcgcctggcgaccggcggtgggcggggcgcgggggcggggtccgctgcggccggctggaaccgcgctccccagagggagggaccccccgtcgcccgcccgcccgcccgcgtcttccgggctcgagtgtttaggggagctcgggtgcaatcggagagttagctctttgaggccggctgcccttaaatcctctcacttcacacataaggaaactgaggccgtgacggccaaggactcgcctaaggtcgttccgtattccacctgctcctctctcccgaagcgggggcactcttccctgaccccagggacgactctgaagccagttctggaggagggcccccaattagaaaaatgccagggaggaatagcaaccctgaccacttaacacactgtgattggggcaacaaaaatcttcacctgagacccaactccgctgttctgcttcctcggtggaagccacacgaaccccactggtacagcggcagcgatagaccccaggcggctgaaagcttatttggagcgtcccggagcatgtcgattgtgctgtgccagtgcagggggagtacccctcagttctggccccaggctccattctttgctaaccggtccaagaagtgggggggcagtcagtgccagtgggtttagaactcctcagccgcggcttcaacatcacacacaaccagaaagcaaaccttcatgaggctgagaggcaggccgccctgccaatacattccatcacatggcaccctcggagcgttcctattttagggactggttggaagacagctagaaacatagaaagcaggcaaaatgtttgctggctttactcctttcctttgagggcatcgtcatgcatcctaggggggaaaaatctgcacagatcctggaaatcaagaacttcgtgaaccagaggaagggggctgtttgccagtactagtctacagaggcctctgatcttttcacatttaatgccccagcatctagagctgagcatgcagaagtcgccacacacacaaatgtccaggtaggtaccactgattttgcttatgatgaagctggagcaaaggcggattagaacggaacagcccagttcttctccatgggatgagtgcccctttgctgggagggccagatctgtgctggctccaacattgcttcctttaaggtgtctgccacttgccaccagtatggttgggcctggcccattctgcacaactagagaaaatggaaaattcaaaggcaatataatatataggcggcagtggaacagggactctcaacagtatacagacagtccctgacttgtgatggtttgacacaggactttccaagtttgcaatggttgtaaaagtgataatctagcatgcgctcaatttaggatgggattatggctggtgaaacccgtcctaagtggagctgcatctatacatgattgtgacctgagttaatgcttttgggcaagttcttattttgtgtggggtcagcaccgtggtgcacagtgctccatccagctgtcccttcctgctctcctcaggtggccatgcactcatacagccctggagtttctgctgaaggctgaggtttaattttttacactcttctttgtcactggccaactctataccagtaagtaggcacctctctgaaaggcagtgttcttaagacactgttcgcttcaggggtgaggaagcagaaggtaagagtagagtgaacacagatttgaatgccagcctctccattgcccccaatactccatctgctccagagcttagtggagatgtttgctatttaaaacaaacagccttactggcttcacatgatcatctgtttatttgggtcatgtggggacagcagccaggggatgttagacaaaaacaagggtttagaagggaggctgcaggccaggagcggtggctcacgcctgtaatcccagcactttgggaggccgaggtgcatggatcacttgaggtccggagttcgagacaatcctggccaacgtggtgtggtgaaaccctgtctctactaaaaaaaaaaaaaaaaaaaggaagaaaaaagaaaattagctgggcgtggtggcaggcgcctgtaatcccagctactgggggtggttaaggcaggagagtcacttgaacccgggaggtggaggttgcagtgagctgagatgacaccactgcactccagcctgggccacagagagagactccgtctccaaaaaaaaaaaaaaaaaaaaaaaaaaagggtgggggaggctgtttctggacctattgttgcctacaggagcctgaaaatggccaaaaacaatacctcatcaaccaagctttccccagttgaggaatggacagtgggggtgggagatacctataaatggcgatgtgagggcatgaaagaagaggggaatgaataggagggctgtttaatattttagccccagcttcctgttccaagggggtggagccaggatagaagctggcaaatgtactcactcaagagaaagagaaataagtccttttggtttcagcagaaaggttagcaggtttggggaattatccaaaggccagcaatctctaaaaaggtgttccttaagtttctttttctttttttcttttttgagatagagtctccctctgttgcccaggctggagtgcagtggtgtgatcttggctcactgcaacttctgcctcccaggttcaagtgattctcctgcctcagcctccggagtagctgggattacaagcacgcaccaccacgcccggctaatttttgtatttttagtagagacggggtttcaccatgttggccaggctggtctcaaactcctgacctcaagtgatctgcctgtcttggcctcccaaagggctgggatgacaggcgtgagccaccgcgcccggctgttccttaagtttcttcatggcttctgggtgcttagtaccttggagcaggagaaaagctgggctgtccatcattgtgagtttctcacgagagggtttccgttttcagtcttcctccccgagtcttgtgcaccccacctcccagttcaaattccattatgtcctccaattttttaatcttttattctttttttcaccaaccacaataagaagcaccaattccccaattttttaatatgctgagccagagacatccccttagtggaactgtcttcctatcccccaccactcacctaacaaagtatcaactccaagagctatgaaaatcagtgccctgactcctacaaagcctgagtcatgagatgggggaaagggcgtgaagccgaaagtacagatgttcacaggaaatcccaacccttcaagcctgatgtctcatcttttgcaagcagctaaggagcttttcacataccatcattaaaacaagacccatgggaggaagctggctgcaggatgaagaggaaaaaacagaagactagtacactcaagacataccagagaagatccatttcataaatatttattgtgtgcctgaggtgccaagcactaggctaggtatgctgtggccaaggccaggggacctctggtaagccagagcggggcaaaagcaaacagagcggaactccactccactgtgataacttgcaaaagattagttctgctgttcgccaccgtgctggatgcagcaccagagacaggacgacacgaggacccagagggcgccgccatgctcatttcagaaggtgcagcctccgtgtccgtgggtccgcacccatggaggcaactaaccgtggatcaaaaatattcaggaaaaaaaaatggaaaatatacaagaaaaaataatacaaatttaaaaaccaacacagcacaagaactatttacacagcatttacatggtatgaggtatttgagtagcgcagagatgagttaaaggatacctgaggatgtgcataggttacatgtaagggatttgagcatcatccatggacaggtattcagggaggctccaggaaccaatccccattggacagtgagaagcaactgtaattccgtttttctatgtagagataaaaacaaattcagtggatttaaggctgggccagtcaactgagcctgattcccccagtctgaatgatgagtgggactctgaattcctttgacagaggtggacccattcaatcatcagtgaaatggggtccccacagccaaaagtttccacaggactctttacctcctttccccaccccaagtgagttgtcagaggacctctcctgaactcacagaacaggtccaatcaagttccacctccccattcatgtcctttccagaagctgggcgcggtggctcacgccctaagttccagctacgtgggaggctgagacaggagaatcgcctgagcccaggatttcaaggccagcctgggcaacatagcaagatactgtctcaaaaaaaaaaaaaaaaaaattgcagcctcacatgatgtcatagctggaagagctgggatcatggggtctgacctcccaagagaaggtgtatccaaggtcacaaagctgccaagcatcagctaggttgagaagtggcctggtcctcctctttggctggctgggccaggcctggggaagtgctatcagtgtggggtgttgagtccctgaaagcctcccagaagtgggtgaagatggagagggaactccacccctcctcgttaaagacaggaataatcattcactttgcttagtggtccccaataaacaagcttagcagataagcgggaagacagggaaagggaatcagacttgggatccaggagctcgcaggaccctgttctgccccaggccactcaggaatggagagctgctagctggacctgggtaggtcaccattactcactggggcttttgtctggcatgaaaggtgacgggagaaaggggcagatttttatccaggcagccaccgtgggtgtggacactgagtaataaggaaagaaatgcagttcagaagcaaagagggaggagccaggtcctctgagctcttctgagaaaccagagcccagtcgagctctgcagctagagtggcagctgcggatgacagtgggtcagaagcttggtgggaggaggctgacccagcggaaaggcacaggagacggatgacgatgtcagggattcctttaaaggaaaaaagaggtggctttatgacagcaaaactaattcaggtcaagggagtgggactgggcagaagttatgagtaaagccgggtggagtcttgccatgggagtcaagagtccgctggatcacgcaggggtggggacatggtgatagggaagaaacctcccaggaccgacgggctgcaatgtgatcagtgccccacacaaaggactaaggtctatatcccagcagccccagttcacacccaaatgcaaggctgtagcatcaagtcttgaaagcccaagagatcagcagcctatgccaggaatgaggctctctctggaggcaaggccgagagcagtggccggtcactggctgcacagcccagagcagataccacagagccagggctcagctccaggtgcactatgagatctctccccaaggccccagggcccactgggaaaggacacaccactgctgcccagcctgctccactccctgtgccatcagggacacctcagtggggagtgctagagcttcccagcgccctctctgatgagttagtctgaaataatgctgaaccactggtaaaagacaggtccttaaacttcacaccatacagcaatgtaaattcaaatgctaaatgtaaaaaataaaactaaaatagccataataaaatataggaaaacatttttcagctctagggtggtgaaggagtttctacccataaaggcaaacaaagaaaatataaaagcacagtgtgatagatttgattacctctaaaagctataaaaataaaacaaaatcatcactaaagaaaagaaaaaggggccgggcacagtggctcatgcctgtaatcctagcactctgggaggccgaggcgggcggatcacgtgaggttgggagttcgagaccagcctgggcaacatggtgaaacccctgtgtctactaaaaatacaaaaaagtacccgggtgtggtggtacatgcgtgtaatcccagctactctggaggcagaggcacgagaattgcttgaacccgggaggcggaggttgcagtgagccgagattgcaccaccgcactccagcctggggcggggctggggggtatggggagaaagagcaagactctgcctcaaaaaaaaaaaaaaaaaaaaaaaaaaaaaaaaaaaaggccgggcacagtggctcacgcttgtaatcccagcactttgggaggccgaggtgggcggatcacgaggtcaggagatcgagaccatcctggctaacacggtgaaaccccgtcgctactaaaaatacaaaaattagccgggcgtggtggcatgcacctgtactcccagctactcaggaggctgaggcaggagaatcacttgaacccaggaggcggaggttgcagtgagccgagatcacaccactgcactccatcctgggcgacagagcgagactccatctcagggaaaaaaaaatcacaatggggccaagcgcagtggctcacacctgtaatcccagcactttgggaggccgaggcgggcggatcacgaggtcaggagatcgagaccatcctggctaacacggtgaaaccccgtctctactaaacaaaatacaaaaaattagtcgggcgtggtggcgggcgcctgtagtcccagctactcgggaggctgaggcaggagaatggcgtgaacccgggaggcggagcttgcagtgagccgagatcgcgccactgcactccagcccgggcgacagagcgagactctgtctcaaaaaaaaaaaaaaaaaaaaaaaaaaaaaaaaaaaaaaaaaagaaaagaaaaaggaaagtgaaaaccagaaaatccaaatttccgactagtaacggctagctgaagcaatgctcacaatactgacagcatgtgaggaaaacagggttgctactattagcagggcttgtcgctgggcagtgtggttaccactaatttttatttgtacaagttttctgaaacatgttaactttataataagaaaaaagttatattactaaatgaaaaagattataaaacactaagataccatatgatccataatttctatgtaaaaaatatgcatataaaatagacaacaaaatgtaaaataatttgatttgaatagtagaattctagtgttattcaatattttctaaaatttttctcagacagggtctcactctgtcgcccaggctggagtgcagtggtgtgctcacagctcactgcagccttgacctccctggctcaagtgatcctcctacctcagcctcctgagtatctgggactacaggcgtgcaccaccacacccgactaatttttttattttttgtagagatggtatttcgccatgttacccaggctggtcttgaactcctgaggtcaagcgatccatccacctcagcctcccaaagtgctaagattaaaggtgtgagccacagtgcccagcatttctaaattttttataatgaaaatgtactgctttttttttttttgagacggagtttcactcttgttgcccaggctggagtgcaatggcgtgatctcggctcaccgtagcctctgcctcttggttcaggcgagtctcctgcctcagcctcccaagttggctgagattacaggcatgacgcaccatgcccggctaatattgtatttttagtagagatggggtttctccatgttggtcaggctggtctcaaactcccaacctcaggcgatccgcccgcctcagcctcccaaagtgctgggattacaggcatgagccactgcatccggcctgtcctgctttttaaaaataaaattgccgggcacggtagctcacgcctgtaatcccagcactttgggaggccgaggagggtggatcatgaggtcaggagatcgagaccatcctggctaacacggtgaaaccctgtctctactaaaaatacaaaaaattagtcgggtgtggtggcgggcgcctgtagtcccagctactcgggaggctgaggcaggagaatggcgtgaacctgggaggcggggcttgcagtgagccaagatcgcgccactgcactccagcctgtgcgacagagcaagactcgtctcaaaaataaataaataaaataaaataaaataaaataaaattgtcggactaagaattaaaaaaacctggctgggcacagtggctcacgcctgtaatcccaacactttgggaggccgaggtgggcggatcacgaggtcaggagatcgagaccatcctgcccaacatggtaaaaccccgactctaccaaaaattcaaaaattagctgggtgtggtggcgtgcgcctgtagtcctagctacttgggaggctgaggcaggagaatcgcttgaacctggaagacagaggttgcggtgagccgaaatagtgccattgcactccagcctggcgacagagcgagaccccgtctcaaaacaacacaacaacaacaacaaaacctggaaattatcaaagggggaaaatgctggcctgtcctgtatcagaaagggcctcccattttttgggatctcgcatctcttgatctcaaccaactcccctgcctgtgggatctatttcccattctactctttcttttgaaagcttccagttcactccccaaacaaagcagatttcatcttgttctctgcccaaaatacctaaatctactctttctacttctttactctgaagctccccggaactcgctgaggccattacagagctctatcgggctggactggggagaggtttctaaggtggaattggtgggatttagtggaagactttacacctggtgggaaaggagggggaagaacagagatttgtcctctggagagctgggtggatggtgagcaaggcaacaggagaagcaggtgcagacaatcagaggagtttcacacggccatgggccggcgggtgaggaatgaggatgctggaagttcaggatgggtctggatctgggcacaatgaatgtatgaggagtggttgaagaaactggcgtggatgaggtcagccagcagtgggagaaagagcaagcaggcccatgggtagactccttcggactcctcccttaagaggtgggaaggaccctaaaacagggaaacaggcagcaagccgaccagtagctccagtgagagggtcgtggaggcaggaagacacaggcagttctactcctggtggcagaagtggtcactgacaaacggtttaccgcaaattgtttttttcttttttttatttgagacaaggtcttactttgttacccgggttggaatgtagcagtacgatctcggctcactctagccttgacctctctgggctcaagcaatcctcccgcctcagctcccccaagtagctggaactacaagtgcgcaccatcacacccagctaatgttttgtatttttcatagagatggggttttgccatgttgcccaggctggtctcgaactcctggcctcaagcagtccaccaacctcagcctcccaaaggtgctaggattataggcttgcgccaccatgcccagctggtttacatttttaataaaataattaattgtcagggttcacaattaagcaaatttctcataaatctggatttctggcttccctcaaaacatcagaagatccagcaacactgggcacctatttcagcacagcaataaccagggggagctgaacacaagccactccactatatttttatttttagatttattattattattttgagacagagtctcgctgtgtcacctaggctggagtgcagtggtgctatcttggctcactgcaacctccgcctcccgggttcaagcgattctcctgcctcggccttccaagtagctgggattacaggcatgcgccaccacacccagctaatttttgtatttttagtagagacggggttttgccatgttggccaggctggtctcgaactcctgacctcaggtgatccgccctcctcggcctccagaagtgctgggattccaggctgagccgctgcacctggctgagatgtttcctttgagaacgaagaagtcctcatctttgctagtccagagctctcactgaatatggccagagtttgctccataaagcccccaaataaacccacatctgggcagccgtgtgcggtggctcacgcctggaatcccagcactctgggaggccgaggcaggtggataacctgaggttgggagttcaagaccagcctgggcaacatggtgaaaccccgtcttctactaaaaatacaaaaaattagccaggcattgtggcaggtgcctgtagtcccagctacttggggagactgaggcaggagaatcgcttgaaccccggcagaggttgcagtgagctgagatcacgcctttgcactccagcctgggcaacaagagtgaaattctgtctcaaaacaaacaagcccacatttggccttgaaggcaggaatctgggacaaatatgtgtgaagtaaggatcctgtgtcagaccagacagggactccccttttcccagcaggagacacagtttccaaatggccagtctctgggcacaggcccctgctcaccagtgtcccaggagggggcctgctcagcagtgccctctgggccacattctcattctctctctggacagcagcagcacaagctgccatttccctggggcctgactggctcctcgagccagccaagtgccccagctgggaacttcctggctctggtttttagattctggggccacattccctgaatgggtccaccagatggcaggcagcctttcctcttcccagactgatactagttcacacaccctgcccggggaggaggcctggctgtttttctggcaattgctaccttctccaggaagctcaaaaagcacatcagttttgtgttgttctgtaagtgaaatatctggagctgccttattttaaaaaaataattaaacctctctttcattatacaattatgtattgccaaagaataattcacctaataatcagttatttcctattgattctggtccaacatgtactttaactagacattttattttgcgctttcactaactacataattacctgcactactgccaaatacaaagttctgtgaagatttggtagcataatttttttttctcattctgtcccccaggctggagcacagtggcgcgatctcggctcactgcaacctccgccacccgggttcaagcgattctcctgcctcagcctcccgagtagctgggattacaggtgtgagccaccacgcccggctaatttttgtatttttagtagagacgggtttcaccatgttggccaggctggtctcaaactcctgacctcaggtgatccacccgcctcggcctcccaaagtgctgggattacaggcgtgagccactgcatctggccccaacatgtactttcactagatattttattttgcgctttcactaactacttaattatctgcactactgccaaatacaaagttccgtgaagatttggtagcataaatgaagaattctaagtaattccactgactacatgtcactcgttcatcataggctggaaaataatattaccttgaagtgctaaactgtgagggtgaaagatgcttttttccttccccgtgttgtatcactgcagccccctccctagaggtgggtcagacgagcctggaagtacatttccacatgaagtgcggcacttgctatagacttttgagttccggcacaagatcccagtcttggcttcttggacctgagttcgaatcccatttctatgactgagctccgtggataaccttacagcaagtcactgacactctctgagcttccctttccttcagccaccacctaggaacgtcacacaggctgacggggttactaaatgagacagtgtgtgtggaaggtggaccatcaatattggcccccagtcctccctccatcacatcaagtatgggttttgctctttgtcaacggtggtactttacacctacagacatacacgtgaggtctcagccttttcatctgagtctactggtagaaggttttctgaatggaaatggacaattcaaagaatcggaagaggagcaagtgtttccaccctctgctgagatttcagtccttcttgcacttaagcactgctctaaatgtgaagcgacaattcctcatctgtggcacgaggaagacaaggcttagtaaacggacttaccctgtgcaaggaatggaactggacgggaacccaggtctgaacgtcgaagtctgtgctctttcctgcctcttgctcccctagggtgggtggaaaagagtcttgggtttacacctgcctggccctctcagagcaccatttgcgagccagttctgccaagtccgactgtacttttcctctaccccttctcctttcagttcccctgtgagggaagcacccacaatcttcctcttccctaaggaaacccacgcttctgcttggattgagaccggcagacaggctacatctcaaagggcacctcgaggggcaagggcgttctgtagtcacaacacagtccgtggagtacaaagcacagcctccaccaggcagcattagctgctccaaccaggaatttaaaacaccaaccgctgttttagtcatttggctgagccacagcagagcatgtgaatgtcacagaacagagcaggaacgccggggcacgtgtgatgcccatcatcagtggggcaggcgccgtccgggcctctgatactgcgctggcactcataccgagagccgcgtactcgggattactagagaggttcgacacatcagtgctgcccgcaggaggcaggagtcagttcattctattcagcctcttctgggttttaccgaggttagtgcccattcagcaaaccaagtctcctgtgcaccaacttccctaaaaaggccgtgaccctttcctgaggggaccccctctatcgccataaacctgctgcacctttgaaatgctccttcttccagagggctcttgacttacttttcccacctggccccttctcctcctatgtgcacaactgctgggcggccacatctgatcctgtaccagaaacataaggggagacgggatcctccttgagcccacacagaccccagcgttctccccagaaacgccccttgtgagaagcaaggccggctaaccgacagcatctacaccacacagaaccctcaccttctgatataagcaacacacgacatgcatggtagccagccaaccagaggaaccccaaacaagggtcaacaacagaacactgaacccagctgctttttttttttttttttttttttttttttgagactgagtcttactctgttgcctgggctggagtgcagtggcacgatcttggctcactgcaacctctgcctcccgggttcaagcgattctcctacctcagcctcctgagtagctgggattacaggcatgcaccaccacgcccagctcatttttgtatttttagtagaaacagggtttcaccatgttggtcaggctggtcttgaactcctgaccttgtgatctgcctgcctctgcctcccaaagtgctgggatgacaggcgtgagccaccgcacccggccttctgaacccagctgctttcttggagatcttggtattactcctggcttttggaaagttactgtttgaagatcactcagcatttcccctccagtatcttcattaactagatatcaagaaaaactggatccaaaggactggcccaacctggatatattctagagtagaaggacagctggaaagaacagaaaaaacagtcagctgggaccattaaaaaaacattaaaaagtcgaaagggattataccaggtaaagagaccatggctagtgtttttttctctttctacttttatttttcaaattttatttctgtgaaaatgtatttgtttacataaaaatacaaatctgggtagcaactgggtatttcaagaaaacaccgtggacagacttgtctccattcccacggggaagtgaaggcgctttgataaaagggccaagggtgccctcgtgtggccacggagggaaatgccgcggcttcagcagaaaggaggggctccaggagctggtcgtgaagtcatcagctcccttctttcaaaaggcctcggatttcccacaggcttttccatcttttccactccttgcagttttgttattcctgtcacaacttagaagttcgagtgctcacatggtaagctttgatttccatcgagaggaaaggctttatgttttataaaaaatatatactaaagtaatctacacgaagcttaggatgagttgaaagggtactgccaaaacgcggccctgcccaggacacacagcagaggtctggagtggggacagtgcggccagcatgtgtggggaaggaagcaggctgacggaggcaaagcagattccgaagaacaaaagcagctttagtttgcctgggcaacaggctcaacttctgtctccacttcagttatcaggagaccagaagccgattctagggaccagaagagaatgtagggtcacatcaccaagatttaatttcataccaaccccgcaacatgaatgtgacctctggacaccgggagagtaacactcaaggttatgacatatgagtcaataacccatttcttcaaagaaaaacttgcccacctgtaccagaggtatatgctatgaaacaacacacaattataaagcatatgcatgaccaaaacaatgcttagatgtcctttaaaaatattttcaatgttctctcactaggtagcctaagaaaatcttctcagggaaggaaatggaaacatccaaatgcacagaaggcactcggctccagactgaaagctggcctgctcatgggttcctttttttttttttttttttttttttttgagacagtcccactttgtcgcccaggctgtagtgcagtggcattctcggctcactgcaacctccacctcccaggttcaagcgagtctcctgcctcagcctcccgagtagctgggattacaggcacgtgctatcatgcccggctaatttttgtattttgagtagagacggggtttcgccatgttggccaggctggtctcaaactcccgacctcatgcgatgcgcccatctcagcctcacagtgctgggattacaggcgtgagccactgcgcctggccacggtcacggattttttaaaactctaaggtcattagcttgacatctataaaatctcctccatgacatgaagccttaaacctagggacagaaacacactgagacacagaaacaccttctgtgcttcaatacacagagcattctctggaaatccctacgacacaggcttaaaggccagtgctgtgcctgaaagacattttgaacaggcaaggagtgtaagctaatacactactgttacaacatggacaaatacttgtaagatgttaaatgaacaaaggaccagaatacaaaactgaatacgcagcatgaggacaaccaaagttaaacccacacactcacacaccccgtctacagagagactagaaaggaacacgccaatgccaagagtggttatgttacagaaggttgggactcggggtgattttgttgttttgactttcatttttccaaatctttaatgagcatgtgccactctttcataatgaaacaagcaaacaataagtacttactacttactgaatgaatagttgccacttaaacaattatcctaaaattataccaaggaaactaggtttgggcccagcaaatgactcaaatgtaatattcactcgaggtaaggacagtggggtggtgtgggctggcacagcagaaaatttctagaccaggggaatccacggtcctgaattgagtcttggctctgtgtgaccctgggtattgttttttgcagcctgacacatgaatgcttggactagaataatgattcttaatccttagtgggttattgacccctttgtctgtgtctgagggttctgggaaccctctctccaggaaaaaaaatacacacacacacacacacacacacacatgctcacagagcttttagaagtaactctaggaggtacatggactctctggaggtccacggaccaggttaagaacactggtcagaggctgggagtagtggctcacggctgtaatcccagcactttgggaggccaaggtgggcggatcacccgagatcatgagttcgagattagcctggccaacatggtgaaatcccatctctaccaaaaacacaaaattagccaggcgtggtggcgcgtgcctgtaatcccagctacttgggaggctgaggcaggagaatcgcttgaacccgggaggcgggggttgcagtgagctaagatcgcaccacggcactccagcctagacaacaagagtaaaactccacctcataacaaacaatcaatcaaaaagccactggtcagtatgctgccttctccagctccagctccacagccaagttaaggcacagcagttccgcttcctgtgtctctgccgagggcctgatctagctgctgccaagacatgccaaggtcaccagcttcccgtcctgaccaacagccacctctcagaaggctggcttaactactcagccccagtcttcttagcagatggcaaggagctctggccaagattttagtctaaacagaaccctaggctgctgatgcaacatcaagcacagcaaaaggtcacccctttccggggggacggctactgaaccctggcattccaattagaaacgtgtttcaaggacacagttactccggcctcagaactctccaatgtgagtaggtaagtacaggggggattacaagtgaagccacaaaaaaacagtatttgatcagcaacaaaatatctgagactttcttaagctacctacggcacatactattttgttctatttctcatttctatcatcagccgctcactcagctaaccccaggattcaaataggaccgctggtttttaatttgtgaatattcttatttaaaaacaaaacaagctctacttcagatgtccaaacaaaaatcacacagtagtaaaactgctacaaaatggtactgtcaacaggctggaggtgggggtatgggtgccttctgtgtgcctcagtcacaccggggagttttgcttacctaattctgcttctgaaataagcaacatcaaaacagccaggtgtcaggaatgtgccatttaccgggtggtccccagactctgctgctccttcccagcattactaaggtttctctcccagattccccaccacccaccatacagctccctttgtgggattgatgcaaggtaggccccatcttgaagagtgacctagaacagggtaccagggcctccagctggaggcagagagagccacccctcctcaagaaacacccttgggtgacagagacagcatgatattctaggcagtgctgcccagcccagactccacaaacaacccttctgaccttgcagaggcagtccagagctgaggggccagcttgagccagcttgcaatccctcgggagtttactgagggctttctgttgttactgatgaccacaattcctccttgtaaatgaccacactacgactccctgtaactcaaaaagcgggaaggaggcggggggaggtgggggacagattcataggtttttgttttcgaagataattccacatcgtgctactaatgggccgctggtaggattcctcttgccaccccacaggccactccaaagcaagttactatcaacacgtttccaactgtgcaggaggtttctagttaactgcaacaagcctgaaaatttggttacgtatgtaggtgcaaagctggttcatcagatccctgttctggccctcaacccagtgcatctccactaaggcatcgtccacctccttcttaacgtttatcaaacacttaaacaggtactgtccggccactcctgggagacgtttccccctttcagccactgggctgccgaactgctcagaagcctcttggtcctgggctccgttgctagagccttgacaactttccaaaacctccacccctcccttttcctcactcctttcatcctccgtgggttccgggttttcctcctgggacagggactcctggctcgggcacgggccctccacagcggcagcctcgccttcccgcagagcaggcccacagggggtcctctcctgggggcccctggccagttcttggctattgccagactctttgggggtgggctttttctcttccaaggcctgaatgacgtcctcaggagctcggggaacttctctcagctgtctcacacgctctcttttctttctccttaaatgaatccaggagttttctatggccgttaggaaaaggctgacttcctcttttccacagggaactcgtttatgctggacctgtttggaggaaaaacagaattttgtgggaaatcacgtttcccctctctccaaactctcaataaaaaaaaaaagaaaaaagaaaaaagagaaggatcattatgagtacttcgtcaatatggttaagcaggtaccttcaaatcagtgagaattttttcaatccatgtcgtgacaacgactatgccttccgccgtctccgagcgcagaggtgatgctttgagggataattccttcatcacggacgccagcaccacgaatgttatgggttttctcggtttctctaattttcttcgcttacttggtggtgactgcaagaaaaaggaagcatagaaaagagaagaaagttatccgaataattaaacctcatgcattgtaatgaactcagagaaaatttccacaacttctgctaccaatcatagagcactgaaaacacaaagggttttgtgtgtgttatgtccagcacttaaaacaaccctgcaaggtgcagtcattcacgcctataatcccagcactttggggggccatggcaggagcatcacttgagcccaggagtttgagatcagccccagcaacatagtaagacctccatctctaaaaaaacgtttaaaactagtcagccacaatggtgtatgcctgtggtcccggctactctgaaagcagaggagggaggatcatttgagcccaagacttccaggctgcagggagctctgattgcgccaccgcaatctagcccaggaaacggggtgagaccctgtctcttaagaaaaaaaaaatttttaattaaaaaaataagaaccccacaagatagtttaggcatctccaggaaaacgaagatacagaaaggctatgtcacacagctcaaggtcacacagtaactgcagttaggactgaacgccgaacccacgttctttccagccgcaccgcactgcctttgttctggctatcagatgtaactcctccaactgctaaacgtccttcgtgtacctgtggtacccaaagcagacctgcacaattatttatttcatgacaactcgaggaccctgggggcactgtgttcttggctggaaagaactgcagggcagaaacatcatcaacttgtagtttgagtttatattggctgaggcttgagataaagcagccggtgaaccacagccatgagatgacatgcgaggaaggatcagggccactaagatcacgtgggcagaggaggaggactcctgaatcgtggctgatgtcgggaccaagccggcggcgagctaagcactgccttttagctggggagggtgacaccggcgctgatgagaagactggatttcaaagctggttccaagaaaatcacgactggcatcttccattctatctcaagctgggaaggtgaattataccctacccactagagggactcaagttccactttaaaaaccaatggcacctgccgggcgcggtggctcatgcttgtaatcctagcactctgggaggccgaagcaggcagatcacttgaggtcaggagttcaagaccatcctggcccacatggtgaaaccccgtctctaccaaaaatacaaaaattagctgggcatgggggcacgcacctataatcccagctactcgggaggctgaggcagaagaattgcttgaacccaggagccaaaggttgcagtgagccaaaggttgcagtgagccgagattgtgccactgcactccagtctgggcctgggcaacaagagtgaaactccgttttagaaaaaaaaaaaaacaaaaccaatgccaccactgtattgaaaatttatttattcatttatttatttttgagatggaatctcactctgtcactggagtgcaatggcgccatctcggctcactgcaacctccacctccggtttcaagcgattctcctgcctcagcctcccaagtacctgggactacgtcaccaagcccagccaatttttgtatttttagtagagacggggtttcaccatgttggccaggatggtctcgatctcttgacctcgtgatccacccacctcggcctctcaaagtgctgggattacaagtgtgagccaccgtgtccagcctgagaatttctttctttaaagtagaaactttaggctgggtgtggtggcttatgcctgtaatcccagcactttcggaggccgaggcggccggatggattgagctcaggagtttgagaccagcctggccaacatggtgaaaccccatctctagtaaaaatacaaaaattagccgggtgtggtggccgcgcctgtaattccagctactcgggaggctgaggcaggagaatcacttgaacccaggaggtgcaggttgcagtgagatgagattgcgccactgcactccagcctggagacagaaggagactgtgtctcaaaaacaacaacaacaaaaaggataaaaaagaaaaaacaccaagtcaggtttgaagatctttttctgctaaaaggaatctgacgactgctactgatcattccagtcgtacctggccacactgacagcgcacacgcacacatgcagacaccacaggttctgattactgggggacgtcttctaataagaactaaccagcggcctcacactgcatacatacacaacaacctaaccagtttattctatactaggaaactgttagggaaggataaaaaacaaagggtgtgtgtgtgtgtgtgtgtgtgtgtgtgtgtgtgtgtgtgtttgaagaacctgctcttgagaaatgaatagtggactctaagacctgtctgaacctgaacttgttcaattatgtttcagacaagatgagacaaattcatattgacattaagacagtcatattgttattactcaatcatcctgcatgagaaacataatttctagtctactgagagcctaacgctttgcagtaaggagcttacaataagcgtattaagctggggaagaagcgtattaagccggtgtgtgggaggatgatgggggtggagaatcagactccccattccccgtcccaacatcaaaggccatgaccatggagagctcactgcaacctggccctccctgccagcccgccctgtacagcaaaggtcacctacaagcatggctaaaagggcagcacttcccatctcttctcacagaaggagtgatcattttgctcacaaattctgaccagtaaagtcaggatattgctgtttctcattatgctaaagctgacctgcgacactctttctccaaaagtaaggacgggcttcatcatttctagagattaaaataagaaaatacatctttaccaacctgacaagaactctatcagggatactttcagagttctgaggaagtcagaaatcacaaaatcgacaacttattacccagttatctcaggactaaaatgaaaacttccctctctcaaatatggctccttcacctgcatcctgacccaactttcccatatacaatggtcagtcaacaaacttgatattcctgaagattttttaaaaaattttccttttattttattttattttattttattattttatttttttttttgagacggagtctcgctctgtcgcccaggctggagtgcagtggcgggatctcggctcactgcaagctccgcctcccgggttcacgccattctcctgcctcagcctcccaagtagctgggactacaggcgcccgccactacgcccggctaattttttgtatttttagtagagacggggtttcaccgttttagccgggatggtctcgatctcctgacctcgtgatccgcccgcctcggcctcccaaagtgctgggattacaggcgtgagccaccgcgcccggccttatttttattttttaaatagagaagggtcttgctatattgattgcccaggctggtctggaactcataggctgaagctctccatctgcctcagcctcccaaagtgttcggactccaggcctgagccactgcgccagctgcattcggaagatttctaatgaactgctctagcacacacatgcacacacatcatctcaggacggtcttcaatttggctttgctctactatagaaactagacattaagagacagacaggccaggcgcagtggctcacgcctgtaatcccagcattttgggaggctgaggtgggtggatcacaaggtcgggagattgagaccatcctggacaatatggtgaaatcccatctctactaaaaatacaaaaaattagccaggcgtggcggcacacgcctgtagtcccagctacttgggaggctgaggtgggagaatggcgtgaacccgggaggcggaccttgcagcgagcagagatcgcgccactgcactccagcctcggtgacagagcgagactccgtctcaaaaaaaaaaaaaaagacagataattcatactccaggagttctcaggcaaggcttttaaatgatgaaagattaactgaagtatggctcacagcagttgttcagtcccctcttatttatcatgaaaagtcctcgtgggcagggtcacagtaaaatataggatcaagttctaagaaattaatagttaaattcaacaccacagctctctggtcgtaggcaatttttacattttgctgcaaacactagtacatagaagctgtcagtttttccccaattgaaatgatcttattttgctaatatccttataattgcaaaacacaaatattttaaatgaagagtgctacactcaaactgtcataatctagtttagcaggcaaggcgtacataaataattcaacattttaaagtctaccccaaaaccaatcatttacaatgattaatccagtttaatgcaaagaactaggtgaatttacagctgattttggatttgaagatgcactgctggaattacaatgtgagagaagcctggtgagcagtcgtaggtctgcagagaccacaggttttatatcttttgaattccaagtagtcaaggaatgatcatcaataagagaggaactgcaagcgttaaaaacacattagatcacagaagccatcaatcaggcacaaacaaacaaacaaacaaaaaaccagttcttaaattttaaaatatgctacgtagcagggtggtctacaaatttcttttcttgtctttttttttttgagacagggtcatgctctggcacccaggctggagtgcagtggcgcaattacggctcagtgcagcctccacctcctaggctcaagtgatcctcccacctcagtcttctgagtagcagggactataggtgtgtgccaccatgcctagctaatttttgtattttttgtagagatggggttctgccatgtcgcccagactggtacaaatttgaatcttcactttaatttctaaatctcaatgatgccatcagccaagaaactttcacatgtggtgtagcttgacacagatcagtgtagcatgttatgtctccgttaattatggctaaggcaaaaaaaaaaaaaaaaagccacaggctgaatgaaatcattaaattctctctagtatttgcaggaagagaagagccattctacagagaaatctggtgcgcacgaagccacaacctctttgttttggcaaagcagcttctagaaaaacctcaagtggaaaggggacagggcagagaggagaccccagtgcagtggccgtctgttttttaaaagagatagggagttacaatgttgcccaggctggccttgaactcctgtgcgcaggtgattctctcacttcagcctcccaagtagctgcaactacaggtgcacatcaccacacccagcccatttctttcatcttaatctgacaggtcgttgtttaaaatgtcctgaaatcacccccaggagtacgtaaaaacagtaaaaagtaaaaatagcagccgggtgccatggctcacgcctgtaatcccagcactttgggaggctgaggcaggtagatcacaaggtcaggagatcaagactagcctggccaacatggtgaaaccccatctctactaaaaatataaaaattagttgggcatggtggcacgtgtctataatcccagctactcggcaggctgaggcaggagaattgctcgaaccagggagtcggaggttgcagtgagccgagatcacgccactggactccaacctgggtgacagagcaagactccgtctcaaaaaaaaaaaaaaaaaaaaaaaagtaaaaatagcaaggggaagaaaactattgcagaatgctacctatttaagaaggaatgattataaatacatacgtgtatttctttgaatttgaaaaaatgggtcaggcacggtggctcatgcctgcaatcccagcacttttggaggccaaggcaggcagatcacttgaggtcagtagttccagaccagcctggccaacatggtgaaaccccatctctactaaaaatacgaaaaaaaaaaaaagagccgggcatggaggcatacacctgtaatcccagctgctcggaagactgaggcaggagaataatagcttgaacccaggaggcagggcctgcagtgagccgacatcgtgccacagcactccagcctgggcaacggagcaagaccctggctcaaaaatataaatacaaataaaggaatgataaattataaaactgtttaaatagtaacccatgaagaagtaaaggattagggtgaatgagatagaagaaagaagtcagacttctgaccattcttttgagatttttttcatttcacaggtagagaaataagaaatatattttattacaaaacaaaactaacaacaaaaaaggcactccctaaaaatctgaagatgatgaaacaaacgaacctctgtcctgactccatgcagaaaattcagagtggaaacgttccaaatgactttgaaatccatcatgagagtctccaaggacaaaaaagaattgtaaaagtaaaaaagtagctattttcagaaatcactttgttgatggtaatgttacttttgagactcctggggcatattgtgagataaagttaatgagtaatatgttggctgaggactggagtttttggcatgggattcttttatttttttaagagatagggtcttctgtgttgcccaggctggcctcaaacacctgagctcaagtgatccccccgcctcagcctcctgagtagctaggattacaggcgtgcaccaccgcagtcacaggatttttgaatgggagatacagatggacaactgatgaaattaagtaaaaacccacagatgtgaagctgaataaagtatcagcaagtatatgctgggtacagtggctcacacctgcaatcccagcacttggggaggtcgaggcaggaggatcacttgagcccaagagtttgagaccagcttgggcaacatggcaaaactccatctttacccaaaaaaaaaaaaaaattagctggatgtggtggcaaggaaggaagggagggagggaggaagtggaagagggaaggagagggatgggaaaggaaggggaggggagaggaggaaaggaaaagaaaggaaaggaatcaacaagaacttgcaacatatttcatcttaaaaatagtaattcctagctctgctgaaaaagcctctaaaaacaatgactaacctggtaccatccctagtgcccagatgaatacctttaaatacgacttcccagcaaaataaaccagatctcctgggagaaatggttgattccagatctgagagaggaaaaaatatgagcctagaacaacctgtgataccagaaagcaaggaagccaccaaagactacagtggatatgataaaaaagactcacgagccaagttgaataaattctccatggccaaaggcggttaactgtgcctcagtagagatagtaagtgtaatgaattgaaaaatgtagcctcaacccgggaggcagagcttgcagtgagctgagatcctgccattgcactccagcccaggcgacagagcgagactccgtctcaaaaaaaaaaaaaaaaaaaaaaaaaaaaaaaaaaaaaatatatatatatatatatatatatatatatatatatataaattgtaatacagcggggcacagtggctcacacctgtaatctcagcactttgggaggcagaagcaggaggatcacttgagcccaggagttcgagaccagcatgggcaacatagtaagaccccatctctatttaataaaaagaaaaaaaaaagtaatccatgacttcataagatgctacaaaggaaaaccaaaccaccctctttggtcacttttggaagatgctagggaaccaccaactcattgtttttatttattttacttttttactttttgagacggagttttgctcttgttgcccaggctggagtgcagtggcacaatctcggctcaccgcaacctctgcctcctgggttcaagtgattctcccgcctcagcctcccgagtagctgggactacaggtatgcgccaccaggcctggctaattttgtatttttagtagagacagggtttctccatgttggttgggctggtctcgaactcccgacctcaggtgatccacccgcttcggcctcccaaagcgctgggattacaggcatgagccaccgtgcccagccaactcattatttttaaaactgataaagcaaaagaatgaaacttttttttttttttttggagatgtagtctcacccaggcggagtgcagtggtacgatcttggctcactgcaacctccacctcccgggttcaagcgattctcctgcctcagcctcccaagtagatgggactacaggcgtgtatcatcacacccgactaaatttgtatttttaatagagacggggattcactatgttggccaggctggtctcgaactcctgacctcaggcaatccgcccgcctcggcctcccaaagtgctgggattacaggtgtgagccactgtgctcggccaagaatcaaacatttatccggctttactagatgaactgtacttcaaagttactaataactaataggagaagtttcctttcatagaagtacctcagctaataaatgaagggacgaatagaattggaatatcattatttgcaactctaaatgaattaatggatctaggcaatgatcatcaatgactgctcacatcatgaagacacaatctaacatgtgcctccatacgatagtatataccacataccacctgcaaagtattcttgctccccctccccaatcaaaaaaaaagaacaatcaaccctgtatctgatcaagctgctgctgcttctttttttttttctgaggcggagtctcgctctgtcgcccaggctggagtgcagtggcacgatctcagctcacagcaacctctgcctaccgggttcaagcgattctcctgtctcagcctcccgagtagctgggattacaggcgcccgccaccatgcccggctaatttttttctatttttagtggagacgggggtttcaccatgttggccaggctagtctcaaactcctaacctcagttgatccacctgcctcggcctcccaaagtgctgggattacagacatgagccacctgcccacttcccactttttttctttttaagacaaagtcttgctctgtcacccaggctggagtgcagtggtgcaatcatagctcactgcagactcaaactactggggtcaagcgatcttctcatctcagcctcccaagtagctgggacttcaggcgcataccaccactcctggctatttttttttttcatagagacagcgctgctgtacctaaaaatatgcttctatctgtatttaaagttgaattatgaactttagacagtttcagttgccttaattctgttctattcagatatatttttagaattctctttttttttttttttttttttgagacggagtctcgctctgtcgcccaggctggagtgcagtggcgggatctcggctcactgcaagctccgcctcccgggttcacgccattctcctgcctcagcctcctgagtagctgggactacaggcgcccaccaccacgccgggctaatttttttgtatttttttagtagagacggggtttcactgtgttagccaggatggtctcgatctcctgacctcgcgatccgccggccttggcctcctaaagtgctgggattacaggcgtgagccaccgcgcccagcctagatatatttttagaatttttttttaaattgaaatatagatacagaaaagcacatctgttataaacgttaagtcttaagaacttatttaccaggaaccccaattccctctcatgctcattggccattaccaatccctctctcagtatcccaatttctatcaccatgggttgtacctgtttgcaggcttcagtatctgacttctttcatgtaaattattaaataataataattattattatttttgagacagagtctcgctcttgttgcccaggctggagtgcagtggtgtgatctcagctcactgcaacctccgcctcctgggttcaagcaattctcctgcctcagcctcccaactagctgggattacaggaatgtgccaccatgcccagctaatttttgttacttttagtagagacagagtttcactatgttggccaggctggtctcaaaatcctgacctcaggtgacccacctgcctctgcctcccaaaatgctaggattacatgtgggagctgctgcacccagccttttcgtgtaaatcatgtgtatgggattcattcatattgttgtgaaggcaggttcattcactggaacagaattactgtttagtttccatcttctgaatatactacaacttatttaccctttctactatttagagacatttcagtggcttctagtttagggctattatgaataatgttgctgtgaacattcttgtacaatgtttgtgatacgtgtgaatacacatttcttttggatataaacttaggagtggaattgctgggtcacagggtatgagcaagctcagctctcataaatcttcctaaagatatgttctcctgaatgttaccagttgacacccagctgcatgagaggatcggcaattgctctgcatccttgccaacgctggatggtctatccagtatgccattatgcttttcatttgcagttctctaataactaatgagatttaacatcctttttggtatcttttgactcaaaaataaataaataaataaaatgcctgtgaattggggagtctgcaatctgcattttggggaatagatggtttaaaattaaatgtttaaaaataaccttatcatttgccataatttgtagaaataacaacggagcaagagaaataacaacaaggatataataacaataataacaaggagaaataacaacaagctatcttctcagaagctcaatgtgactcaatattttttttttttcttttgagactgagtcttgctctgtcgcccaggctggagtgcagtggcacgatcctggctcactgcacactctgtctcccaggttcacgccgttctccagcctcagcctctggggtagctgggactataggcgcgcaccaccatgtccagctatttttttgtatttttagtagagacggagggaaggtttcaccgtgttagccaggatggtctcgatctcctgacctcgtgatccgcctgccttggcctcccaaagtgctgggattacaggtgtgagccaccacgcccagcttaaatgtgactcaatgttaaattagtttgcattttaggctgggtgcaatggcttatgcctgtaatcccagcactgtgggaggccgaggaaggtggatcacttgagcccaggagttcaagaccaacctgggcaacctagggagactctgtctctataaaataatacaaaaattagccaggcatggtggcacatgcctgtaggcgcagctactagggaggctgacaggggaggatcacacgagcctgggaggtcaaagctgcagtgagccgtgagcgcgccaatacattccagccttggcaacagtgagacccagtctcaaaataaaaaaaaaaattaagcttggtggaattatttatatccgacgctcacggtcatcgccaaggtctgagttttcacaaaaaaaaaacttgcaacttccggcataaatgggttaatggtcagaggaggaatctccaggcagagggattagagagctgtagctcaacatgactggagtaacaaatacaggggcaggtgggaagaaatggtgggaaatgacaacacaatatattttactgagcattactacataccaggcactaagttaagtacacttaatcctcaaaacaaccctatgtggtagatactattattcttccccattttacagatgaggaaactgaagtttagcgaagttaagtagcctgttctatgtaaagccagacagggaccagctcacaaaaggccttttccacacctatgcaagaaggttttggtgttatccacagtacctcagttaaacaaaacaccagtgtaaagtatgccacaaggaagtttatgcagagtatagataactgaaagagatcaatgcagttaagtccagaggaagggagagatgtccaggttctatgggctgaatgcttatgggagctctatgcaagtaagttggaactgggctgggttgcagtggaggacgtcagagggaaggatcagaacagggtatgagcaaaggctgtacaaagtcagctctgacttcggcaccatgggaaggctgtggagacagtacagtcaggacaactgggagtgattaggatggaaagtcaggacagatctgggaggcccaaggagccaaacgaggagctgtacttcctcccacttgtggtaggtggccactcaggagtgggtgagcaggatgctgactgcaggatgaatccagtcactcgcagatgagaaactgctaggatggtccataagcaagatgtgaggccatcatgagcaggttctggccaggccaggaacaacatagggccgtggcgggcagagtgtcagagtgacattaggtgctcaggctgtgaaatcagactcatctgggttctaacctgactttttggagcctgcagtagacgtagttcactcgattgctgtcaggtggaaataaaatgagactataatgtatgtgaagtattcaaacaacaacaaatattatatccagtgcttcaaatctactaaatctactggatcctgcgcacgatgttgctctttaacgcaagtcctacaccattcctttaaacatacaacaaacactgggaacgccacccaccgacctacgagtcagacgctggcgactcctcctccataaagcggtctttgactagccccagcctgagccacttccttttctcaactcctggccactcctgcccctaccactcagcacttactcacatgcaaatctgctgcagatcgggatcaatagctccacgtgtttttctttcctataaaactcatcattgtgagtaacagaaaacaatgtctgatttgtttatcatcacaatgaagaccacacttaagaagaaaagtaactaagaagagggtcctaagctttggttttgctcaagagctcagcccctgtccatcttgtagcataatgcacagcctggtacagtactggttttcaaactatttttattcaaacttctttttattttgagacccagtctcactctgtcacccaggctggtgggcaacggcgtgacctcggctcactgtaacctccgcccactgtaacctccgccttgcaggttcaagcgattctcctgcctcagtctccccagtagctgggattacaggtgtgcaccaccacgcccagctaacttttgtatttttagtagagatggggtttcatcatgttggccaggctggtctcaaactcctgacttcaggtgatcaccaccttggcctcccaaagtgctgggatcacaggcatcagccaccacggccagcccaaaccatttcttaacagcaggacactttcaacaaataaatcaacacataataatgataaaagcagatgagctctttaaaatgagagggaggtctcaagtaccagcctgatgtctgccccaccctggggcacctacctggcatccctcagctatgtggacaagactgaaaacctaaggagaagggagctgggcactgtcaggatacccagctccaacatgcacaaagttgcctaattaatttgacacctctcctccatctgctctccaaaaagccctctagttcttactccctagacagccacgtcccaggcttaaaggtaatgtcttcaatgcaggggatcctttttaagcccagagttcctgagcagtgctcacaccaagagtgaacaactcactagggctacactttcccctttttctcctaacaaacgtcaaacttccttcaagcaaaccaaaacaaagctaaaataatgctttcggcaattagcggagagctggaacaaagaggtaagtggcttgttagaattctgcagagaacagtttgtagaacatgcttccttatattcatcattagctgaaattatggaacaaaattctatcaacattaggacctttttgttgctaaaagaaatccagacaacaggaatgggctgagtgtgggcacttgaatcaccagtgaattagaatttttcagcattcagcaccaacagaaacgagtcagtaggcctgagataagtgaaaacagaagttgccatagtaacttgcacatttaccctaaaatggcgggagtgggggtggggaaataggtcaatgtttctgcttaactagctctattccttgtctaaagcagcatcctcctccttccttacccccaccaggagcaagagggggaaagtcagatggggttttcaaaaaacgagggtggggagagaggtctaggaagagggaagagaaccaagaggatggctaaataaaaacctcgtgagtaccctgggacgaccccctggggaaagcagttgccgatcaagggcagcagtgctaagaaactgttgctgggttactacaaatcaggaattgccgttttttcctgtagcggctgaagtgcgtctaacagaacacttgggagtgcattattagcagcttggggctggggtagtggtggggaggaaggaagactctggcaggggggagtctggggccctcagcattctctgatggttgagatgggagtgcattattagcggcttggggctggggtagtggtggggagggaggaagactctggtagggggggaatctggggccctcagcattctctgatggttgagaactatgaacggggctgaaggatgccccaaaacagaggagaggaggggagggaagcttagggggttcctttgcaaaataagctggttttgttaacacagaagcagtgccctttactacgtggacctgacaaggctactcatgcaggagggcccggaggactcggtctcggagctggtgtggagtgccagggtgctttatctgctcttccacctgcagcgccgacacatgtgggaggcgggtgaagcagaaagcacttgaaaacaggtgcagttccagtttgctgcagctgttagtgtctccacggggataactcagagcattactaatgattttaaccatgtggtgtgagggccctgatattctagaaaatgacagaaaggataattcttcggggtggtgaggggtgtcaaaaaaggagaagcatctttttaaccagagactatttcaaacacaaacctctagataacttactgcactgtccaggagtctacccttcatggaagggccattcaaatggcactggggagtgtaattgaacccagcagcacttctagctgcagagtaggacaggctcaacctcggatttaagctcctgttttcagaaacatggtagtatctgcaaattgttcccttgtgctacatgtctctactcctctaccctacaagagcaggagaagagactcagacacacagcaacatgtaagatgacgttagagaccaagagcagccaagagcttggaagaacagcacccagaacaagcccactgtaggcgctgagggagcaaagcagcaggtgtcaggtccccgcacatactaagaaaggaagagcacctgctgggcagtgtgtgcagacacttcagctgggaatctccaggcaacaagaagccaaccacacctgggagggaactgtgagaagcaacagatgctgttctgtcactgcccggaaaatcattcagtctggccagctcagaggtggttttcctttacctatagcagcactgaggacaaagagacatctgtgaacaaaccttttttttttttttttttgagacaggatctcactctgttgccccaggctgaagtgcagaaagtgcagtgacacgatcagggctcactgcagcctctacctgccaggctcaagtgatcctcccacctcagcctccgcagcagctgggactacaggcatgcgccatcaaaatacaaaaatttttgtattttttgtagagacggggtttcaccatgttgcctaggctggtttcgaactcctgagttcaagtgatctgcccgcctcggcctcccaaagtgttgagatcacaggtgtgagccaccaggcctggacacaaatcatttctttaaactttttattccagaaaatgttctagcacacacaaaatagaaaggaataatgatctatcacccagcttcaaaaatggttaagattctagtgctaatctgaaagccaagacagaacccttcattaaaatgatccccaagtgttgcacatcaaaagcctgcaatccaaaaagtcaacttctacgttctccaggagccccaagaggcagctattctaggaaagcagcagtggtaaggaaaagaaagagacctcattttcaattcttgaggaatgtccaccagcgtaattatatctgcaaaatgtttctacaggttatgttacctgaattttgttttttaaaaaaatttttatttatttcatttttaatatttttgagacagagtcttgctctgtggcccaggctggagtgcagtggcacaatctcagctcaccgcaacctccgcctcctgggttcaagcaattctcgtgcctcagcctcccgagtagctgggactacaggagtgccaccacgcccagctaatttttgcatttttagcagagacacagtttcaccatgttggccaggcaggtctcaaactcctggcctcaagttatccgcccagctcggcttcccaaagtgctgggattacaggcataagccaccatgcccagccaaatttttaattcctaaaagatacatttctgtcagctgagcaaaaatcactatgttgtacagactcacagaggaaggctccacagtctccaggaccagccttctaggactgtgtcttggttacaacccctttccattctgacataagcatttgggacaaacttcagttaaacaggacactaccaattcagttcacttatgatggactgaaacccaccatgtgctggcaggtggtgaagcggagcaaggtctgtacttactggtactgtgacatcatcataaaaactccaagctaaggcccatctcattgtccgaccttgacagaattcagtgtacgttactttgggaacctgaaaccaacaaagacagcatctcatcaaactgcaatcattctaccaatatgtttctggctgctgcgtcatgccatattatgttgatccttctttttaatcagttaacaaacaatattaccaaacaacagttatagatagctgcctaataatgaatgaataaatcatctctcaacaaagttatattttttcctcccataaaacataagagaatttacagatatgacttgaaggttcaaatatatgaaacactgaaaacacagctctttagagaattatttgtaatatgactcaagtgagtttttttgttttttgtttttttgagacagagtcttgctctgtcacccaggctggagtgcagtgtgcggtcttggctcactgcaacctccacctcccagattcaagcaattctcctgcctcagcctcccgagtggctgggattacaggcgcatgccaccacgcccagctaatttttgtatttttagtagagatggggtttcaccatcactggtctcaaactcctgacctcaggcgatccgcccacctcggcctcccaaagtgctgagattacaggtgtgagccaccacacccagcctcaagtgattttttgttttcttttttagaaagaaagtcaaccaaagtctgggctagacacaggtaggtaatctgttttatcaatcagattttaggaaaggtaaaggaactagtttgtagctctcacaatttacccaagaaatggtattgtgaggaaaagaggaggaataggacgtcagagagaaaccagagaccagaaactctgctcctcccactggcttgcatctgacccttttgctgagaagtcctctgactcacactaaaaaccagaaactgggaggaaagtggaagtggcggtgggagtatttattttatttaaaagaaaattttttggggagacagggtctcgctctgtcgtccagattgtagtgcagtggcgtgatcttagcttgctgcaacttcaactttccgggctcaatggatcctcccacctcagcctcctgggtagtggggactacaagcacgcgccatcacacttggctaactttttgtatttttttgttgagatgagatttcgctgtgttgcccaggctggtcttgaattcctaggttcaagcaatctgcccgcctcagcctcccaaagtgctgtgattacagacatgagccactttgcccggcctgggagtacttacttgcgacctgccttctgaaacaggagcacggggctctgctcttgtggaatgtcatcctagtgggaagcacaggggaccgagaccgtgtgctggtgctgttcccccagagctaactgcatggcccacaacaagcccttaaacctatgtagcttgagtttctggatctataaaggagtgagttgaacttgtcttggaggcatagtaaaaaataaaaattaaaaaaatattaaaaaggagttcgatgtgaggtcagtggtagataccaggttttttgatttctggcttctctctgacattctactcaccctgtttttctccacctttctctataattgtcaaaaaaggccttgttttaataatctataaaaaatatattttagccctaaaaatataaaacttagaaaacaaaacaaaaaacatatttagagttttagagtataaagaaaattctatactcaaaactaccatcagagtagacacaggtcaggtgcatgggtcacgcctgtaatcccagcactttgggaggccaaggtggaaggatcacttgaggccagtagtttgagaccagcctgggcaatacagcaagaccctatctttataaaaaataaggattacttgagtacaggagtttgaactagtctgggcaacacagagagaccttgtttctactaaaaatttaaaaattagctgggcgtggtggtgtgtgccaacagtcccagctacttgagaggctgaagtgggaggattgcttaagcctagatgtttgaggttgcagcaaactatgactgtgcaaccacactacagtctggttgacagagcaagacaccatctttttttttttttgagacggagtctcgctgtgtcaccaggctggagtgcagtggcacgatctcagctcactgcaacctctgcctcccaggttcaagagattctcctgcctcagcctccccagtagctgggactacaggcgcgtgccaccatgcccggctaatttttgcatttttagtagagatggggtttcaccatgttgcccaggatggtctcgatctcttgacctcatgatccgcccacatcggcctgccaaagtgctgggattacaggcgtgagccactgcgcccagcccgaccccatttctcaaaaaaaaacaaaaacaaaacagtagatatatgaaaaaaaacctcaagatggactaaagacttgaatataagacctgaaagtacaaaaaatactagaagacttggtcccaaaggaaaagaaatcattaggtggggtgcaatggtgcacacctgtaatcccagcactttgggaggctgaggtgagaggactgcttgagcccaggaatttgagaccagcctgggcaacatggcaagaccccatcactactaaagaaaaacaaaattagctaggcatggtgccatctgcctatagtcccagctactcaggaggctgaggtaggaggatgggttgagcccaggagttcaaggttacagtgagtcatgatcccaccactgtactccagcctgggaacagagctagacttgatctcaaaaaaaaaaaaaaaaaaaaaaaaaagaagaagaagaagaagaaaagaaaagaaagaaaagatatctggacttgaataaacttaagtatccatcaacaaaggactggattttaaaaatgcagtatacatacacaatggaatactattcagccataaaaaagaatgaaattgtgtcttcagcaacatggacagaactggaggccattatcttaagtgaaacaactgagacaaataccacgtgttcttacttctaagtaggagttaaataatgtgtacacatggaagcaaagtatggaatgacgggcaaagggagacttgtggttggggagtgggagaccgggtgacgggaggttgcttggtgggtaggacatgcacaacgacatgaattgttccggtgacagttacactgaaagccctgacttcaccacaatgcaatatatcaatgtagcaaaactgtacttgtgccccatggatacaaagaaaagtagctacacgagaacagtaatgaggaagcctcaccccttgtatgcgaagctcctccttcagaggcgccaggctgcatttctttcccagcatgcagctataccatctaggaaaaaaaaaatcagacaagtaaatacggtttatgtggttaaaattttaaactaagcattattcaagtgaataagatgagaacagtaacaaacaaacattgagtaaggtcacaagtgaaaaatatcaggaattacatacaatgtatttcgacaaagaccaaatctaatgatggaaaacaagcccaaggcaacttaaaaaataaataaataaataaatgtacttagcctctccaatgcttcagggctatgtattaaatatttggaaaaagagtaaagaagtctcatctgtcatgcttacaacgaaggccgtttatctctaggacagaaattagaaaataaaaaacaacaaaaacataatactaagagaactcaagattagatccagcatgaacctgtattgtgagatgtcctcatctgcacgtaatttaaggatagataatgcatttgagtttcaacagatcatgaaatcaatttgctctagagtaaaaacaaatccagaagaaggaatgtggagaagttggactgaactgattaaaaggtaaagggatagaatatactgcttctgattattctaaaaagtttgtaaaggacctttgcttcagcccatgaaagattagttactatgggaattgcccttccaccataaacaaccaggaaactggacaaaacatataaaatagctgtttttcagacattggataactggcagtgcagacctacagtcccagaaacaaatgaggtgagcctgcatttgctagagctttcctagaaggaaattcccagactgcagtacagggaaaagaaattcaaacacagtccaacgtcttgctgagttgatgagacacagatcaaagttcagagatgctgacggagttacgatttgtaaagcaaattaacaagagcaaatgaaacccaagtaagaagaagaaaggaaaaaaaaaaagattagagcagaaactgaggaaagagaaaacaggaaaacaatggagaagaatgatgaaaccaagagctggttctatgaaaacaaattttcttgaagtcaagaaaaaaagaagacagaactctcagtatcagaactgaaagaggggacgtcccacagaccctataggtattaagaggggacgtcccgcaggtcctacaggtattaaagggtgtgaagaggtatagaacaactttttgccaataaatttcacaacttagatgaaacaaattgcttcaaaaacacaaactacccaagattactcaggaagaaatagataacttcaatagttcttttttttttttgagatagtcttgttctgttgcccaggctggagtgcagtggtaccatctgggctcaccgccacctccgccttccgggttgaggtaattctcccgcctcagcctcgcaagtagctgggattatatgtgtgtgccaccacgcccaactaatttttttgtttttgagacagagtaccactctgtcgcccaggctggagtgcagtggcgtgatctccactcactgcaacctccacttccgggctcaagcgattttcccgcctcagcctcctgagtagttgggattacaagcgtgcgccaccacacccggctaattttcttttgtatttttagtagagacagggtttcaccatgttggacaggctggtctcaaactcccgcctcagcctctctaagtgctggaattacaagcatgagccaccatgcgtgacagagaaatagataacttgaatagttctctatcaattaaagaaactgaatttgtattaactttccagacccaagtcacttcactagtgaattctactaaacatttaaggaagaaataatattaattatatgcaaactcttccaaaaaatattaaagagggaacacttccccaactcatcttataaggccagtattacatcaacaaatcatatcatttctttttttttttttttgagacacagtctcactctgtcacccaggctggagtgcagtagcacgatctaggctcgctgcaagctccacctcctgagttcaggccattatcctgcctcagcctcccgagtagctgggactacaggcgcccaccacgacgcccggctattttttttttattattatttttatttttagtagaaacggggtttcaccatgttagccaggatggtctcgatctcctgacctcgtgatccgtccacctcggcctcccgaagtgcggggattacaggggtgagccaccgcacctggccttatttcttataatgataagaaaggtatagaccaggtatccttcatgaacataagatataaaaatccttaacaagggagggtaggctgggaaaagggaagatgttggtgggagggcacaaagtttcagacagcaggaataagttttagtttttagcatagcatgttgactatagttaataatgacatattacatatttcaaaattgctaaaagattagacttaaaatgttctcaccacacaaaaaattgggtgaggcatatgttagttagtttgattgaatcatttaacaataaatacatacagccatgagtcacataaggacatctcagtcagtaacagatggcacttacaacagggggtcccataagattaaaatggagttgaggccgggcacggtggctcacactttgggaggctaaggcggcagatcacttgaggccaagagttcgagactagcttggccaacatggtgaaaccctgcctctgctaaaaatacaaaaattagccagatgtggtggtgggcatctataatcccagctactcaggaggctgacgcaggaaaatagcttgaaccccagaggtggaggttgcagtgagcagagatcacaccactgcactccagcctgggctacagagcgagactctgtctcaaaataaaataaagtaaaataaaataaaataaaatgaagttgaaaaattcctattgcctagtgatgtcgtagctgttgcaacatcatagcacagttttaaaaaataaagtgtagcttaagtgtacggtgtttataaagtctacaatactatacagtgatgttctaggccttcatattcgctcgccactctctcactgactcacacagagcagcttctagtcctgcaagctccactcatggtaagtgccctacacagatggaccattttttttttttttttttgagatggagtttcgctctgtcgcccaggctgcagtgcagtggcgtgatcttggctcactgcaaactctgcctcccgggttcaagcaattcccctgcctcagcctcccgagtagctgggagtacaggcaccccctccaccactcccagctaatttttgtatttttagtagtgacagggtttcaccatgttggccaggctggtcttgaactcctgacctcaggtgttccacccacttaggcctctcaaagtgctggaattagaggtgcatgccaccatgctaggctaattttttgtatttttagtagagacagggtttcaccatgttagccacaatggtctccatctcctaacctcgtgatccacccaccttggcctcccaaagtgctgggattacaggtgtaagccgccgtgctcagcccatttttatctttaatttttactgtcccttttctatgtttgatatgtttacatacacaaaacttaccactgtgctaaaactgcccatggtattcaataccatgctgtacatgccgtacaggtttgtagcctagaaaacacaggctattattacattataggcctaggtgtgtagtaggctatatcatctatagcattcacacaataacaaaaaaatcacctaatgatgcatttctcagatttcccccctcattaagcaacacatgactgtatattaaaacatcaccttgtaccccccaaaaaatacaactattatttgtcaagtaaaaataaaatgcatataaaggtcagggatttatatgcgtggtggctcacgcctgtaatcccagcactttgggaggctgaggtgggtggatcacttgaggtcaggagtttgagaccagcctggccaatatggcaaaaccccgcctctactgaaaatacaaaaattagacaggtgtggtggcacacacctgtaatcctagctactcaggaggctgagacaggagaattgcttgaacccgagaggcagaggtcacagtgagctgagatggtgccactccactccagcctgggcaacagagtaagactctaacttaaaaaaaaaaaattaattaatttaaaaaataataaaataaaaggtatataaaaaaggctttaaaatccttaataaaatactagtaaatttaatccagcaatatataaaaagaataatacattataaccaaggggcatttactacaagaaggcaaggctggtttaatattcaaaaatcaatatctataagtcactgtattaatggactaaaaaggacaaaccacattatcacctcaatagactagaaaaagcatttggaaaaagtcaatgctttttcatgacaaaactcatcattcatgattaaaaactctaaacagactagaaatagaagaaaacttcctcaacctaataaagtgaatctaagaaacaaacaaaacccccaaaccaaaaaactctgtaacagccaacatcatcatggtcaaagtataataaaactgccttaagattgggaatgatgcaagatggccactcttcaccacttctattcaaaattgtgctggagatcctagtcagtacaagtaaggcaagaaaaagaaataaaatgcatacaaactgaaatgaaagaagtaaaactgcctttacttctgcctttacatcacagaagacatggtcttctacgcagaaaattccatgaaatctaggaaaaacctattagaactaataagtgagttcagcaaggccacagaatgaaaggtcaacacaaaatcaattgttggggccaggtgcagtggctcacacctgtaatctcagcactttggaaggccaaggtgggtagatcacaaggtcaagagatcaagagcatcctggctctccctctccctctccctctccctctccctccacggtctccttccacggtctccctctgatgccgagccaaggctggacggtgctgctgccatctcggctcactgcagcctccctgcctgattctcctgcctcagcctgctacgcctcactggttctcgttttttttttggtggagacggggttttgctgtgttggccgggctggtctccagctcctagccgtgagtgatccgccagcctcggcctcccggggtgccgggattgcggatggagtctcgttcactcagtgctcagtggtgcccaggctggagtgcagtggcgtgatctcggctcgctacagcctccacctcccagccgcctgccttggccccccaaagtgccgagattgcagcctctgcccagccgccaccccgtctgggaagtgaggagcgtctctgcttggccacccatcgtctgggatatgaggagcctctctgcctggctgcccagtctggaaagtgaggagcgtctctgcccggccgccgtcccatctaggaagcgaggagcgcctcttccccgccgccttcccatctaggaagtgaggagcgtctctgcccggccgcccatcgtctgagatgtggggagcacctctgacccgccgccctgtctgggatgtgaggagcgcctctgctggccgcaaccctgtctgggaggtgaggagcgtctctgcccggccgccccgtctgagaagtgaggaaaccctctgcctggcaaccgccccgtctgagaagtgaggagcccctccgtccagcagccaccccgtctgggaagtgaggagcgtctccgcccggcagccaccccgtccgggagggaggtggggggggtcagccccccgcccggccagccgccccgtccgggaggtgaggggctcctctgcccggccgcccctactgggaagtgaggagcccctctgcctggccagtcgccccgtccaggagggaggtggggggggtcagccccccgcccggccagccgcccagtccgggaggtgaggggcgcctctgcccggccgcccctactgggaagtgaggagcccctctgcccggccagccgccccgtccgggaggggggagggggggtcagccccccgcccggccagccgcccagtccgggagggaggtggggggatcagccccccgcccggccagccgccccgtccgggagggaggtgggggggtcagccccccgcctggccagccgccccatccgggagggaggtggggggtcagccctccacctggccagccgccccgtccgggagggaggtggggggggtcagccccccgcccggccagccgccccgtccgggagggaggtggggggatcagccccccgcctggccagccgccccgtccgggaggtgaggggcgcctctgcccggccgcccctactgggaagtgaggagcccctctgcccggccagccgccccgtccgggagggaggcgggggggtgggggtcggccagccgccctgtccgggagggaggtgggggggtcagccccccgcccggccggccgccccgtccgggaggtgaggggcgcctctgcccggccgcccctactgggaagtgaggagcccctctgcccggccacgaccccgtctgggaggtgtgcccagcggctcattggggatgggccatgatgacaatggcggttttgtggaatagaaaggcgggaagggtggggaaaaaattgagaaatcagatggttgccgggtctgtgtggatagaagtagacatgggagacttttcattttgttctgtactaagaaaaattcttctgccttgggatcctgttgatctgtgaccttatccccaaccctgtgctctctgaaacatgtgctgtgtccactcagggttaaatggattaagggcggtgcaagatgtgctttgttaaacagatgcttgaaggcagcatgctcgttaagagtcatcaccactccctaatcttaagtacccagggacacaaacactgcggaaggccgcagggtcctctgcctaggaaaaccagagacctttgttcacttgtttatctgctgaccttccctccactattgtcctatgaccctgccaaatccccctctgcgagaaacacccaagaatgatcaataaaaaaaaaaataaaataaaaaaaataaaaaataaaaaaataaaaaaataaaaataaaatttaaaaaaaaaaaaaaaaaaaaaaaagagcatcctggccaacatggtgaaaccccatctctactaaaaatacaaaaattagctgggtgtggtggtgcgcgcctgtagtcccagctacttgggaggctgaggcatgagaatcgcttgaacctgggagacagaggttgcagtgagccgagattgcgccactgcactccagcctagtgacagagcaagactccgtctcaaaaaaaaaaaaaagtaaaatactaataaaataaatcaactgtattttcttatagtagcaatacctaactagaaattaaaattttaaaatgccatttacggtagcatgaaaatacataaaatacttaggaataaagttcgtataatgtgtgtaaaggtgaaagatattgaagacctaaataaatgaacagctaaaccaggttggaatggaagactcattattgttaaggtatcaattctttccaacttgacctataaattcaacacaatcccaaccatacattttcatgaaaattgataaactgatgctaaaatttatatggaaatgcaaaagatttcaagtagctaaaacaaatttttttccataaagacagggtatgcctatgttgcacaggctggtctcaaactcctggatgcaagcaatcctcctgcctcagcctcccaacgtgctgggattacaggcgtgagccaccatgtctggcttaaaacaattttgaaaacaaaaaacaaacaaaaaaaaacaaagatagaggatttatactgccagatttcaagacttctacaaagctatgataattcagaccatatggtactggcataagatagacacagattaacagaatggaacagagtccagaaataactcacttacacggtcagctgattttaaacaaaggccactaaaggtttggtctttttaaaagagatttatagaaatggaaaggcaactatagactgggaggaaatacttgcaaaacacatttgacaatggactgtattcagaatctataaagaactgccaatcagtaagattaataaaccaataaaaaggagatacaggaatggccaataagcacatgcggatactccctatcaccagccaccagagaaatgcaaattccaatcataatgagataccactacctacccgttagaacagatacatttttaaaaggtgacaacagtaccaaatggtgtcaacggaaactctcagatattgctggtgggaatgtaaaatgctgtatagtcactttgaaaagcagcttcttaataaagttaaacatacacttacaacaggaccaggagtcctactctcaggtatttacttaagatggaggaaaatttaattagacacaaaaaattataagcaaatgttcagttttattcctactagccaaaacctggaaatgacccaaatgtccttcaactggcaaatggatgaacgaactgtggtatactcagcctatttagcaacaaaagggacaggccactgacacaaaaaatcatggatatgctgctacgtgaaagaaagcagacaatcaaaacctacattttctatgactccatttgtatgaaaagtctagaacacacaaaactgttgtgacagaaagtacatcagggctacaggaagctgggagcagagtgtggacagactgcagaggggaacaggaaacttttcagggtgatggaaatgttccacatttgtctaaactcatccaactgcacacttaaatgggagttactcaagtttacctcaggacgactgactgaaatatataaatttataaatgggattatcttataccttcaaatacacataaaataaggttaaccatatcgtaacgttttacatgtttccttcttgttttgtaacagcttagccaaactaacaatacatattctgtctcctgcttttctcactaagcattataatcaacctgtgtcattcaaaattcacctaatcgcattaaaagggaaatttcagattaagggatatacattcaatatttaattgtttatatacaaaatgcctactacaagatgaattttcaagaatttaatttcaagaatttaaatttcaagaaatttcaagaatttaaattctaagagaatttaagagcctctaaaatcaccaattaggttaaaactgtatgaaactgacatttttatacatcaaaaactgttttataggtcaaaaactattgaagactggcaatctggtatttcgacctcatacattaaataacataaatgaaaaatctaattattttaaaagtatgaaaaatactattatattactttagaaacagtgggcatcaacaaatattttgtcttcactgtgaattcaacaagaggtgaccacatctatttttgtttaggcaatcctttttccctttgaaaataaagaaataattgttatagctaaaacactttaaacaaaccccggtaaagttatttaaaggataataaatttcatttggtggtttaaaaatgtttagaagaaaaataatatgttccctttaagaaagtatcatcgggcacagcggctcacgcctgtaatcccagcactttcggagggcgaggtaggaggatcacttggggtcaggagttcgggaccagcctggccaacatgggaaaccctgtctctattaaaaaatacaaaaaaatttagctggtgtggtggtgcgcacctgtagttccaggtacgcaggaggctgaagcaggagaatcgcttgaacccaggaggcggaggttgcagtgagctgagatggtggcactgcactccagcctgggtgacagaggtagactctgtttccaaaaaaaaaaaaagaaaagaaaagaaagaaagtgtataaatggattcattaaccaggaatttaaagccttgggtatattatgaacaagaggaaggaagagaaatcgggagcaattagtgctgacacagtaacagcataaaacaggttaacagtttcctttaaaactagcattcctcaacagattagatagatcagagctatcagaagccaagaagcggcacagaacaacaaaaaaagatactggcttggcgtggtggctcacatctgtaaccccagcactttgggaggccgaggcaggtggatcacttgagcccaggagtttgagaccatcctgggcaacatggcaagaccccatctctacaaaaaatagctgggcatggtgatgcatgcctgtggtcccagctactaggggggctgaggtgataggatcgcttgagcctgggaggtcagggctgcagtgagcagtgattgcaccactgcaccccagcctggatgacagagcaagcccttgtctcaaaaaaaaaaaaaaaaaaaagatactgtaaggttcttcaggagatgaaggaaaagaaatatttagaagacaagaaaagctagtaatagttaaacatgccattgatacttaatagacactcgggagggagttcatatttcttttaacctttgcactaaactgaataccacactgcgaatcatttcagattgaatgtcatatatacgctgttttcagcaacagttgtatttgttatggaaaaagcagaagtcattggatgtgttaaaaatcctattttagctgcacattttaaatatgcctacccactagatcctagctactctcaacgggcatcttgtgacaactaatcaaaatgcaagtggaaaaaaaaatgaagaaaaggaagatctagtcacccaagagactttgaatccattaaactattttaatgatgaaagtagcactctacttattacaacatttaggaattcctctgagatggtaggtttcaagaaaaattattttgaaataatttcaaactttcagaagagttgcaggattcgcgcaaatgactccagtatacccttcacccagattcaccaattacatcttccttcattctgtgtgtatgtgttttttcctaagctgtttgagaatcagttacagacatcaacatgtctcattaactgtaatattttggcatgtccattttaaaagcgtgtattgttttttgtttttgtttttgttttttttagactttttttcagacagaggctcactctgtctcccaggctggagtgcagtggtgcaatctcagctcactgcacctccacctcccaggctcaggcgattctcctgactcagcctccagagtagctgggattacaggcatgtgccaccacaacaggctaatttttgtattttccctagagacagggtttcactgtgttggtcaggctggtcttgaactcctgacctcaggtgatccacctgccttggcctcccaaagtgctgggattacaggtgtgagccgctgcgcccccacggaaacaagtgtattcatttttgtaaccacagaggaattatcaaattgctaaaacttaacactcattcaatactattatctggaatacagtccacacttaaatttcacctgtttatcccaatattctccccgatacaaggccccttaggattgcgaatttcatgtacttgtcatgtctctttagcctccttcaatctggaatagttcctcagtcttcttttactctcatgaccttaatgtttttgaggagctgattttacacagtccctcaactgggtgtgtctgaagtttccacgtcattggattcagatgacacatttctggcgtgaagagcacggaggcgctgcttgtccttccaggtgcgtcacatcaggagatgagcacctggtcagggaggtggcctgtgctttctccaaagcaaactctttactttgtaaactcccacacttctctctgtaactgtaagtaacctaaagggggaaggggtggttctttgaaactaggtagttatcctgttccttttcaaatttccctttgccaattgttccacgaatcaattattactatgattgttgcaaaatttaagagcctctaaaatcaccaattaggttaaaactgtatgaaactgacatttttatacatcaaaaactatttgataggtcagaaactattgaagactggcaatctggtatttcaacctcatacactaaataacatacatgaaaaatctaactttaaaagtatgaaaaatgctattacattattttagaaataagtaatataatagtttattattctttctatatttattcatcggcatccactctatcccctgtatgtactgtatcttattcaatgggttataagtcattattgtcattattcatcttgaaactcatgttgtcccagctttgccctgagctcactctaggttcttctgacatgtcattttttgagtatgtcattactttctggtactagaagatattccaggctcattgtgtattcaccccaactcagaagtggaatttaccgtttctccaaaaaactttttttcccctcactggggaacggttatttagaaacttattaaaaactcaagtgaagtataatatagaaaaacaggaaagcagaggtttggggtataagcaattatgaaccttacctaaaaagttctctaagtagtaaaatccaacaccttgctgcctataataaattaccagaacaaatgcccctagatattcaacggagcagccccaatgtccacctgatctcaaaatttactatttaaactatcataaatttcgaatctatataactaaaaataaacttttatcctatgctcttataagtgattttaattattcactttttgacatggataagactatattattattattatttttttttttttttttttgagacggagtcttgctcagccgcccagggtggagtgcagtggcatgatctcagctcactgcaaccactgtctcctgggttcaagcaattttcccatctcagcctcccaagtagctgggattacaggcacccgccatcatgcccagctaatttttgtattttagtagagacagggtttcatcatgttggccaggctgatcttgaactcccgacctctggtgatctgcccaccttggcctcccaaagtgctaggattacaggagtgagcccccacgcccagccaaaagactacattataacaagcaagtggaaccaaggcttttaatttgttatcctatttatttatttattatttttgagatggagtctcgctctgttgctcaggctggagtgcagtggcgcaatcttggttcactgcaacctctgcctcccagtttcaagcgattctcctgcctcagcctcccaagcagctgggattacaggcacgtgccactatgcccaggtactttttttttttttttttttgagacggagtctcactctgttgcccaggctggagtgcaatggcgttatcttggctcactgcaacctccgcctcccaggttcaagcgattctcctgcctcagcctcccaaatagctgggactataggcatgcaccaccacgtctggctactttttgtatttttataaagacgaggtttcaacatgttggccagactggtctcaactcctgacctcaggtgatccgcccacctcagcctcccaaagtgccaggattacaggcgtgagccaccgtgcccagcctgttattcctttgtagactgttagatgaactcaaaatacatgcttgttgattttaagaattctcttctttcaccagctaacgcagaaccaagcagtgactatgtcacgtagtcggaaatgccatgtaagctgacacagctagctcaccgtggcgcaagctgctggatccaatcttttctccctgagacctcagagcagacaccaatcaacaaggctgccatatcaatcctgaaagggattaaactaagcatcatacctgagttaaaatgatgaaatgcatataacctaattcatcaaagaaaataaggtaaggccaggtgcaatggttcacgcctgtaaccccagaactctaggaagccaaggtggggtggaatgacttgagcccaggactttgaggccaccctgggcaacatggcaaaaccccatctctacaaaaaaatgcaaaaattggccaggcatggtgttgtgcacgtatagtcctagctactcaggaggctgaggcaggaggattgcttgagctcagaaggtgaaggctgcagtgagccgtgatcatgccactgcactctagtctgggtgacagagcaagaccctgtctcgaaaattaattaattaattaattaattaaaataaaataaggtagtcccttatctttcaggctgcttatccttctttttcctaccttagtatgaaggaaaaatcaaaatagcagcatctaccccctgtggagctcacaactgggaaatgttccttcatgttttaattgcaaaaacgctgcactacctggagaacaagctggtacaccatctgtccccagtacttctctatctctggtatctgtgtaggaagctgaggggcacaattctttgtaatgataccctaaaacacctttactgactgacaaccctactttgggtcccagtcaaagatgaaagcaggggtcaaacgtagccattcataacagcctcaacagatggcagttcagtaagaaacaagaagtggtatgttctttttaacagtgaaaacaagaaaacctctgaatgcccaataacaaagaattagttaattatggactgttgttaagctcactagctactgactgattgactgagacagggtctcgttctgttgccccggttggagtgcaatggtgtgatcatggctcactgcagccttgacctcctggacttaagtgatcctcaggcctcagcctcacaagtagctgggactataggaacatgccaccacacaccaggctgattttttgtagacacagagtcttgctatgttgcccaggctggtcttgaactcctggcctgaagccatcctccagcctcaggtttgcaaagtgctgagattacaggcatgagttaccacacccggactgtcaagctacttattttgtatttatttatttatttttaagacatagtttcactctgttgcccaggctggagtacactgtctcaatctcagctcactgcaaccttctgtctcccaggtaagtgattctcctgcctcagcctgccatgtagctgggattacaggcgcatgcacccggccttttttttttttttaaatgccaaagcagctttctccattttctaatttcctgtaagtgtggttatattgtttaagagataacaaaattataaaaataataatgtcagctgggcgtggtggctcacgcctgtaatcccagcactttgggaggccaaggcgggtggatcacgaggtcatgagatcgagatcatcccggctaacacagtgaaaccccgtctctactaaaaatacaaaaaaaaaaattagctgggcgtggtgacgggcgcctgtagtccaagctactagggaggctgaggcaggagaatggcgtgaacctgggaggcggaggttgcagtgagccgagatcgcgccactgcactccaacatggacgacagagcgagactccgtctcaaaaaaaaaaaaaaaaaaaaaaaaagtcattatctaacatttatactacatgctgcaacctcctagaatagtcaagagttaaaaatcggccgggcacagtggctcacgcctgtaatcccagcactttaggaggccgaggcaggcggataacctgaggtcaggagttttgagaccagcctggccaacacgctgaaaccccatttctactaaaaatacaaaaattagccaggcatggtggcgcgtgcctttaatcccagctacttgggagactgaggcaggagaattgcttaaacctaggagacggcggaggttgcggtgagctaaaatcacgccactgcactccagcctggatgacagagcgagactctgtctcaaaaaaaaaaaaaagagttaaaaatcaccctatttaatatccactattattattatgtcaaatatgtattcatttaattctataaccactttatgagatagctactatcattccattttaccaatgataaatcaaaatttcaaaccaaagaatcacattcaaaaggcccagattattaccaatttttgagacgggctcttgctctgtcacccaggctggagtgcagcggcataaacacagctcatggcagcctcaacctcccaggctcaagcaattcttccaccttggcctactgggtagctgggaccacaggcacgtgcaaccatacccagctaatttttaaattttttgtagagatggggtcttgctatgttgcccaggctggtctcaatctcctgagctcaactgatcgtcctacctcagcctcccaaagtgctaggattataggtatgggccactgtgcctggcctaggcccagattattaaatttattacccatcccaaaataggtggattatatccaaatccaagcagtatccatcatctggcaggggacacgctggtgctttgtagaatacagatctctggttcctaagaaaagcctaaaatcattgccataaagggcatcagttatagaactggtaaccaatgacaagagagaatccaaaacatacaaaattatggtgtggagaataaattaaaaaaaaaaaaaattcagggccagggtgtggtgactcacacctgtaatcccagcactttgtgaggccaaggggggcagatcatttgagctcaagagttccagaccagcctgggcaacatggtgaaaccctgactctaataaaaatacaaaaatcagctgagtgtgggggtacacatttgaaatcccagcaactagggaggctgacgtgggagaatcacttgaacttgggaggcagaggttgcagtgagacaagatcactccacctcactgcagcctgggtgacagagcaagactctgacacacacacacatacacacacactcacacacaattcaggccatgaggagtttgataaagtctggtaatttatctagaaggttagatgggtgagtcccttttttttttttcttttttgagatagggtctcactctgtcactcaagctggagtgcagtggtacaatctcggcttactgtagcctcgacctcctgggctcaagcgatcctcctacctcagcctcccgagtagctgggactaaaggcatgtgccaccacatccagctaatttttgtattatttgtagggaaggggtgtcgccatgtggcccaggctggtcttgaactcctgggctcaagtgatccaccaactcagcctcccaaagtgttgggattacaggtgtgagccattgtgcccggactgggtgagtcacttgagaaaaaaaagctattaagtaagctcaagccacaggcacaaaaagccaaagtaagggtgacaagcacttgtaaatcctcatcaacgacagaaaggctcttcacagagtccaactgcagcttagagctgcagaggctgcaaggggtggtggaaagaccactggactagaatgaggatatctgagttctaatttccagtctgtaaaccaagaggttggataactttacctctcaaggtctttccagctgcaaaattccttaagatacaaaacaaaactgttaactgctgctgagcatgacagaggtgagacatgaacctcccaggggaggcgaggcatcacaagcgccatcctgaggtcagtccaacacatttaacttatttcaccccataatgctgcaaattctgcttagttcctgtatttcttcagggacaaggagaaaaacattctacagggataagaaacagatggtagggttaaggcacttgtttataatctcttattttttagagcttcaaaatacacaattttcagagcattctgaaatgtgagtcacacggttgtataaacattatgatgtcaactataaaaatatgcatgggggccgggcgcagtggctcatgcctttcatcccagcactttgggaggccgaggcaggcggatcacctgaggtcaggagttcgagaccagcctgaccaacatggagaaatcctgtctctactaaaaatacaaaattagccaggcatggtggcacatgcctgtaatcccagctactctcgaggcggaggcaggataatcgcttgaatccaggaagcgggggttgcagtgagctgagatcacaccattgcactccagcctgggcaacaagagcaaaaactccatctcagaaaacgtatgtgtatatatgtgtatatatacatgcatggggacacgaactggtagttgtacaaatgtaagtcatcatggtaggatgtgagtgaaaacaatacttgcaagcaacaccctttcacaaaacactgttctagtttcttctcagtaaaaatcacttcatttcttcctttctttcatctaaactctcaaactgcttgagtcctcacagagaagaaagttgcaccctgttttaaataaatcctaaagggcagtgtttcccatatatgagaccaagcacaaaatggccagctctccagagctgggatgggctcttgcattttatccttcctagcaaatttacacccttcattcaatttgcaggctgccacagagccaagtataagcagactaggaacatactgagtccatttctaccccttagaatggtgttctattcaaacatatttttgtagttcaaatggtactttggaaataacagaaatttactgtttaaaagcctcctaaaaacaaccccattattattgtagcctagtagagccacctacagttccccattttcctggctggctctagttccctcaaaagccataatgagggttgggcgcggtggctcacgcctgtaatcccagcactttgggaggccaaggcgggtggatcacctgaggtcgggagttcaagaccagcctgaccaacacggagaaaccccatctctactaaaaatacaaaattagcttggtgtggtggcacatgcctgtaatcccagctactcgggaggctgaggcaggagaatcacttgaacctgggaggcagaggttgcagtgagccaagatcacgccattgcactccagcctaggcagtaagagggaaactcagtctcaaaaaaaaaaaaaaaaaaagtcatcatgaaatggtcacatgacttggttaactcttttctgtgaatttcagtgctgttaccttctttaagtttattttactttctcagacttttctcaatgctcagtataattttagtctatttcttcttcaagatagtctaatgtgtctaaataagtcaatctagactgggtgcggtggctcgcacctgtaatcctaacacgttgggaggctgagacaggagaatcacctgaggtcaagacttcgagaccagcctggccaacatggtgaaaccccaacactactaaaaaaaatacaaaaacttagccaggcgtggtggcgcgtgcctgtagtcccaactactcaggaagttgaggcatgagaattgtttgaaactgggaagcagacagaggctgcagtgagccaacatcaccctagtgcatgcactccagcctgggtgacagagtgagactctgtctcaaaaaaacaaaaaacaaacaaacaaacaaaaacaggatatttgatgattttggaattggtctttaataaaataagcagctttccacctttgggagataggaaagatttatagaataagaatatacaaagattgaaaaggtagtagtagctcctgtagcctgcaaagaccctgtttctgaggatgttttcatttctgaggatgttctcctgtcttttttttttttttttttcagatggagtctcactctgtcacccaggctggagtgcagtggcacaatcttggttcactgcaacctctgcctcccaggttcaagcagttctcctgcctcagcctcccgagtagctgggattacaggcgcctgccaccacacccagctaattttttgtattttttactagagacggggtttcaccatgttggtgaggctggtctccaactcctgacctcaggtgatccacccgctttggtctcccagagtgctgggattacaggtgtgagccaccgtgcccagccttctcatgtctttaagtgattttgtttcctataatcatctatactacatagacagaaaagaggacaataccgtataggaaaaaaatcttccctatccaggaattccacttctaggtctacatccaaagaaatgaaagcagggtctccaggagatatttatatacccacattcacacagcattattcacaatagccaaagggtacaagcaacctaagtatcttccatcaatagatgaacggataaacgaaatgtggcatatcagccttaaaaaggaagaaaattctgaaatatgctgcatcatggaagaaccttgaaaacatgacgaaaagtgaaaaaagccagtcataaaaggacaaatactgtatgattccatttgtatgaagtgcctagagtagtcaagttcatagagacagacagcagaatgatggttgccaggggctcaggaaggagagaataggagggatttaacgagtacagagttacagttacaaaacatgaagagttctggagactgcttgtgcaacagtgagaatgtacttcacattactaaactatactctaaaattttagatggcgatacggtttggatttgtgtccccgcccaaatctcatgtcaaactgtaatctctagtgttggcgacggggcctgctgggaggtgactggatcctgagggcagatttccccttgctgttctggtgacagtgagtgagatctcactagatctggttgtttaagtgtgtagcacctcctccttccctctcttcctcctcctctggccacgtaatgatgtgcctgcttccccttcaccttccgccatgattgtacgtttcctgagacttccccagccgtgcttccggtacagcctgtggaactgtgaactaattaagcctcttttctttacaaattactcagtctcaggtatttctttatagcagtgtgagaatggactaatacagatggtaaattttatgttacgtgtatttaccacaataataataataaataaaaccttccctatgtcccaaagctaaatccttggattgaaagctcttttagtttttgaactaccatattatccatcatttcaacaacatgtggcagggtgagaagtcaagcgagacaaatagctctttttgagtaccttatgttgcttaatgacaggtgtgttgtccaaaataattagctttcaaaaggaatggccttaaccctcctctgcaactggttagtgatctcagtttcccttcattaagttcttgacagctcaatgtcctcacatctgtcactgggagactgattccaagaacctaaactgctgaaaggacgaggcaacaaatttattctggttcatgggacagaactgaacccatctgttttctaatcaaaagccatatttgaatccgttttgttctatcacaggaccatcctaatgggagcaatacaatcatgcggtattttcctctttcctgtctatgtaatatacatgattacagtaaacactaatcaattaaaggcatggaacatcctcagaaacacagtcttcgcagattgtaggagccactacctttgcaatctttatttttattttcatttttatttttggagaaggaatcttactctctcacccaggctggagcgcagtggcatgatctcggctcactgcaacctctgcctcctgggttcaagcgattctcctgcgtcagcctccctagtagctgggactacaggcacccaccaccacacccagctcatttttatatttttagtagagacagggtttcactatattggccaggctggtcttgaactcctaaccttctgatctgcccacctcggcctcccaaagtgctgggattacaggtgtgagccaccacgcccagcctgcaatctttatctgcttgttcttctgagcactaggattacttttgctctgagtgacatagtttgttttagaactacacaggggaggccgggcacagagcctcatgcctataattccagcactttgggaggtcgaggcaggcagatcacctgaggctaggagttccagaccagcctggccaaaatggtgaaacccccttgtctctactagaaatacaaaaattacaggtggcaggtgcctgtaatcccagctacttgggaggctgaggcacaagaaaagcttgaacccaggaggcagaggttgcagtgagctgagatcacgccactgcactccagcctggcaacaagagcaagactctgtcccccgccaccaaaaaaaagagaactacatagcgggtaaatattcctgtgttgtaaagatggactctatgttgtaaaaacagacttaccttaatctttttttaagttgtagactgtcatggatgatccttttaacaaactctaattcacctccttctgccatgatctctgtgatgcctcctgtattaacagaactaggcggaggtcttcgaggatttcgtgagtttactccctgaaaaacaacaaaaaaccctggtgaaaaatgtgtacaccccaagaaccaagtttgaatgtaatctatctctaagttagaatgtttagttgcaatttttactttccaaatagtatgctagatttaggattttaaaatcatagccactaaaatattttatttcaaacagctacttcatgcaactatttcttcccaggtcttttactttccatttttgtggttaaacatgaaaattgtttacctttttataaagcccaatctgtcactttttctttatgctttctttctcctgtacagaagatccacccaaagattaaacaaatatttacttgttttttcctagcattttcacggttttgcttttcacatttaaatatttaatccacccttacctcataccatatgaaaagttaactcaaaattcatcaaagaactaaaaggaaaagctaaaactataaattttcatgagcttggattaattttcattaagaaaattaattttcatgagcttggattaggcaacggtttctgagacatgacaacaaaagcataagcaacaaaagaaaacagataaattggacttcatccgaattaaaaacttctgagctgcaaagggcaccgtcaagaaagtgagaagacaacccacaggaagggaatgtttgcaaatcactatctaataaggaacttgcttataaagaatgcttacaacttaataataaaaacaaaaacaaaccaacttaaacgtgagcaaaagatatgaataagcatttctccaaagaagatatgtaaatggccaataagcacgtgaaaagatgctcagcatcatcagtcatcagggaaatcctaatcaaaaccacagtgagataccactttttacccactaggatggctataatcaaaaagacagatcaggccgggcgcggtggctcatgtctgtcatcccagcactttaggaggccgaggcgggaggatcacgaggtcaggagattgagaccatcctggctaacaaagtgaaaccccatctctactaaaaaaaaatacaaaaaattagctgggcgtggtggctcacgcctgtagtcccagctactcggggggctgaggcaggagaatcgcttgaatccaggaggcagaggttgcagtgaaacgagatcacgccactgcactccagcctgggcgacagagcaagactccatctcaaaaaaaaaaaaaaaaaaaaaaaaagacagatcaggctgggcatggtggctcatgcctgtaatcctagcatctggggaggccaaggtgggcagatcacttgaggtcaggatttcgagaccagcctggccaacatggtaaaaccctgtctctaataaaaatgcaaaaaaaattagccacacgcggtggtgtccaccaggagtcccagcaactcaggaggctgaggcatgagaatcacttgaacctaggaggtggaggttgcggtgagcagagatctcaccactgcactccagccttggcaacagaacaagactccattccccacaccccccgacctcaaaaaaaaaaggacaaataagaagtgttgaccgggtgtgatggcttacacctgtaatcccagcactttgggaggccaaggcaggtagatcacttgaggtcaggagtttgagaccagcctggccaacatggcgaaaccccgtctctactaaaaatacaaaaattagccgggcgtggaggtgcacgcttatgatcccagctactcagaaggctgaggcaggagaattgcttgaacctgggaggtggaggttgcagtgagctgagatcacgccactacactccagcctgggtgacaagagtaagactctgtcacaaaaaaaaaaaaaaaaaaagccacttaacagtaaaaacattgatttccttcctaagccaagaagctcagtccaggagtggactatgacctgagttggtccaatgagaagaaaatcaaatgttcaatggtttagggaagaaaaaagctctctcctcaccctcccaccctctaaatattgctgtaccacaagtaaaccagcttaagaacaaaaacaaccatagaacaagtcacagccaagagaaaaacagagctcttaatactgccaacaccttaatcaagtcattatgaaatcccaactactgctgggtttctcaaatatgtcagccaatgaactttctttgtcgttaagtcaatctaaattgggtttttaggtacaggactcctcggtatctgaggaagatctgccttagataccaaaatccaaggaagctcaagtcccttttatcacatggggtaggatttgaatttcacctgcccacatcatctggtatactttcaataattcctagattagttataataccttatacaatgtgaatgctatgtaaaaatagtgatactgtatttttgtattatttttcattgttacattgttatttttttttgttttctttttttcccaaaatattttttttttgagacagggttaccgaggctggagtgcagtaacacgatcctggctcaatgcaacctgcacctcctgggctcaagccttcctcccacctcagcctcccaagtagctgggtctacaggcacacgccatagtgcctggttaattgtttttgtagtttttgtagagacagggcttcaccacgttgcccaggctggttttgaactccgagctcaagctatccacccacctcagcctcccaaagtactgggattacaagtgtgagtcaccgtgcaagcttcccaatgctttcaatgcatggctggctgaatccacgatgcggaacccacaggtgtaggacctgtggatacagagagccgaaagtacttcaaaccaaaagccccctaactggtatacagctttcaaaagcgaggcactgcagcacacgcctatggcctcagctactaggggagctgacgggcgggggactgcttgagtccggatgttcaagaccagcttgagcaacacagcgagacctcatctcaaatatattaatttaaaaaatagtaagttaattttttaaagttttctttgctcttatctgtgcaaataaggcaaatttagatttttttttctttttgagatagagtcttgccctgtagcccaggctggagtgcaatggcgcaatcttggcccactgcaacctctgcctcccgggttctagcgattctcctgcctcaacctcccaagtagctgggattacaggcatgggccatgacgcctggctaatttttttgtatctttagtagagacggagtttcaccatgttggccaggctggtctcaaactcctgacttcatgattcacccgccttggcctcccaaagtgcagggattacaggcgtgagccaccgcgcccagcctatattcaattattttaaagcagaagacattttaccttggcttccaattgattggcaaaaaagggagggttgcacatgcaaaagtcatagattatctcagattcttctttaagagcatccatcaggagtgtcttctgtggcactttcaccactaggagaaaaaacaggactgtgaactaatattaatgttgcagtggttctaaagtataaccgcgcactgcgtaatgattctttggtcaactgcatatatgatggtggtcccgtaagattataacaccacatttttactgtaccttttctatgtttgatatgcttagatagacaaataccattgtgctaaaatggccttcagtattcaatacagtgacatactgttcaggttatagcctaggagccacaggctattacacataggcccaggtgtgtagtaggctacaccattcaggtgtgtgtgagcacacactacgatgaatcacctaacaatgcatttctcagaatatatccctgctgttaagtaaggtgtgactgtatgtcctcaaactcttcgacagtactcccttcaggagatggagtttaatttccctccccttaagtataggctgcattttaaggacactcaaatagcttcatggagagatccacatggctatgaactagggtttccttccaagagtcgtgtgagtgagccatgagtaagccatcttggaagcaaatctctaccacccatacatccttcagatgactgtagctctagccaacaacttgaccgcaaatgcatcaaagggtctcagctagaaccactcaactaagccatgccaaaatttatgacccataggaactaggagataaatgtttattgtttaaagttgctagggccaagtgtgatggttcatgcctgtaatcccagtgctttgggaggccaagacgggagaactgcttgagaccaagagttccagattaacctgggcaatacagcaagaacctatctctacaaaaattttaaaaataagaaaattatctgagcatggtggtacgagcctgtaattccagctacttgggaggctaaagtgagagactgcttgagcccaggaggctgaggctgcagcgagccatgatcacgccacggcacaccggcatggatgacagagtgagaccctgtctctaataaaaaaatgttttttttttgttgttgtgtgtgtgtgttttttttttctaaaaggctcctagcgccaggcatggtggctcatgcctataattccaacacttcgggaggccgaggcaggtggatcacttgaggtcaggagttcgagacctgcctggccaacatggtgaaaccctgtccctactaaaaaattacaaaacttagacgggtgtggtggtgggcacctacaatcccagctactcaggaggctgaggcaggagaatcacttgaacctgggagacagaggttgcagtgagcagcagattgtgccattgcactccagcctgggcgacacagcaagactctgtctcaaaaaataaaaaataaaaataaataaataaataggctcctagattttggaataatttgttacacaacaatggagaaataaaacaaatgcactaataatattaatgtctccccttacaaagatatgttcaatactatgaagaaaagtcttatttctttcataaagagacataaaatctctttaacggaaaaaaaattaacactgctttatacacagaatggtcacaaaaataaaaagtaactaatcacaaggggatttgactatttctagcacagttctatgtactgaaattattatttgtttttgagacacagtctcattctgtagaacaggatagagtgcagcggcgagatctccactcaactgcaacctctgcctcctgggttcaagcgattctcctgcctcagcctcccaagtagctgggattacagatgcccatcaccacgcctggctaatttttgtatttttagtagagatggagttgcaccatgttggtcaggctggtctcaaactcctcacctcagacaatctgcttcggcctcccaaagagctgggattacaggtgtgagccaccgcacccggcctatgtactgaaattaaaaagatggtatagtttaatcaacagtagggtttccttccttttaaaatcttggtgactaagttacttcatatatagtcaattctcattatctgcgctagttatattctacaaagtagccacaaatagtcaatgagtgaatactgaaccactgattcccaggggaaatacagggttaggttcctacaagtctctcttcgtattttcatcaactgatagacacacaaccttattttatggtgttcctgttcaaagacactttatcgaatatatgtcgctgattcactaacactgaactcatggccaacagcactacagctcgcgtctgaaggaagcttgtctaacacacgtgttttctctgtaaggcacatcacagcctttttgcactgaggaacacaagacagcctttcagcactatgtttagggactattttaaacagcaaaatcaccaagagaaagcacaaaaatgaaaaagaaaaaaaaaaccccaaaacgtggtattaaatagaccaataaaaggacgcttggttcacagtccggaagctggagtaagaaggcagagcattgccttgttgagcctcagctgggaacatgcacactggggcaactccaattatttgccactatgcacaagtctgtgaatgaccacaaaagtaccatgaatgtcaattttaagttaaaaataaattttaggttgggggcagtggctcatgcctgtaactccagcactttgggaggctgaggccagaaaatcactcaagcccaggagttcaagaccagcctgggcaacacggtaagaccccatctctacaaaaaaaacacaaaaattagccaggcgtggtggcacgcactggcagtctcagctactcacaaggctgaggctggatgattacctgaacataggaggttgaggctacagtgaaccactacactccagcctgggtgacagtgagaccctgtctctaaaattaaataagtaaataccttcatgcatacaaacatatacatacactttagctattgataaactaattgtaaagtttatttggagaggcaaaagactcaggatagccaacacaatactgaaagagaagaggcaagttaaaaaactgacactacccaattctaagacttactacaaagctactgtaatcaaaacagtatgtttttagtgaatgaatagatcaacagaagagaatagatatagtcttttcaagaactgatactggcacatcacttggacatccacatgcataaaatgaatctagacaaagaccttatatccctcacaaaatttaactcaaaacagatcacagacctaaatgtaaaatgcaagactataaaactcctagaaagtaacagagtcctgctctgtttcccaggctggggtgcagcgtcgcaatctcagctcactgcaacctccgcctcccaggttcaagtgattcttgttcctcagccacctgagtcactgggattacatgcatgcgccaccacgctggctaatttttgtatttttagtagagatgggggtttcatcatataggccaggctggtctcgaactcctgaccggaaggatctacccacctcagcctcccagcatgctgagattacagcactttttggatataataccaacagtactgtataccattccttaaaagaagggatcaatggccaggtgcagtggctcacgcctgtaatcccagtactttgggaggccgaggcgggcagatcacgaggtcaggagatcgagaccatcctggctaacatagtgaaaccccgtctctactgaaaatacaaaaaattggccaggcacggtggcgggcgcctgtagtcccagctactcgggaggtgaggcaggagaatggtgtgaacccagcaggcggagcttgcaatgagccgagattgcgccactgcactccagcctggcgacagagcgagactccatctcaaaaaataaaaaataaaaataagaagggatcaataagctgggcttggctgggggcagtagctcatgtctatcattccaacgttctaggaggtccagacaagagaatcacttgaggacaggagtttgagaccagcctgggcaacatggtgaaaccccatctctactaaaaatacaaaaattagctgggcgtggtggcaggcgcctgtcatctcagctacttaggaggctgaagcaggagaattgcttgaacccaggaggcagaggttgcagtgagccaagatcataccattgcattccagcctggggaacaagagcaaaactaagtctcaaaaaaaaaaaaagggcaaaaggcctgaacagacatctcaccaaaaaagatatacagatggtaaataagcacatgaaaagatgctccacatgaatatcagcaaaatgcaaattaaaataatgaaataccactacacgcctattagaacggccaaaatccagaacaccgacagcacccagcacccagtgctggcaaggatgtgagcaacaggaactttcatccattgctgctgggagtgcaaaacagtactctggaagacagtttagtggtttcttacaaaattaaacatactattaccataccatccagcaagcacactgcttggtatttacctaaaggagtcaaaaacttacatgcacagaaaaagctgcgcacagatgtttctcacaactttatttgtaattgtcaaaattcgaaagcaatcaagatgtccttcaataggtgaatggagaaactctggtacacccagataatggaatatcaaaatgaaatgtgctaaaaataaatgagctttctgcaattagagaggcagcaggaaaaaaaaaattaaaagaataaaaaaaagctatcaaactataaaaagacattaggaaatttaaataaatgtcactaagtggaagaagccaatctgaaaagtctatatactgtatgattccaattatatgacattctggaaaatgtaaaactgtggagacagtaaaaaggtcagtagtttcctggggttgggggcagtgagagatggacagttgaggcacagaagacggcagggcagtgaaacgattctgtgtataccgtactgggagatacatgtcagcttcattattccaaaactacagaatgtacaccaccaagaggaaaccgtaatgtaaagaatgaactgtgggtgataatgatgtgccagcataggttcatcacctgtaacaaatatcccactctgttgggggatgctgataatggagaaggctatgcgtgtgtgggggcagggatatacagggaatctctgaacctttcacttcattttgctatgaacctaaaaatgccctaaaaaataaactcaacaaacaaacaaaaaacccccacttaaagtctctggaaatgtttctaaggggttatagcgaataaagaaacatttattcaagaaaatctactaaaataaatgaatggataaataaataaatttaggcaaataggcaaattcacaaaaaaagaatccacaaatcataaggatcaactgtagttactattttctgagttaattctggtatcaagacagcaaacccaattacaaagtgccagatttttttaaattaccgaagtctgtgtattaaagaaaaaggtaatgaaatgcgttaaactaaaaaggcaggtgaagacacaaagtttggaggcattcattctgtggcgctaaccttttatgagatcagataagttattctgttccacatttttctttgcatagttgaaacacatatcatccacttctgttgcgaggaaataccagccattcaaggttgctccaagtaaggggtagatgcaagatgcccccgtgcctaataaaataaaaatacaaaacacattctacacaccagagggaaaggttacaataatcatgaaaacaccattcttctcagaattctgtttgcagacagggtctcactctgtcgcccaggctacagtgcagtggtgtgatcacggttcactgcagcctcaactttctgggctcaggcgattctccctgctcagcctcctgagtacctgggactacaggtgcatgccaccatgcctggctattttttgtattttctgtaatttttgtattttttggcagagaaatcacaagctggtacctgatgtcatacatgttatggctactgggttccctagtcattcgtgtatgttagtcctacctcctaattagatccaacttcctaaaggatcgaaaccttgctggcctcctctttcgtgtgttgtataaaaaatgaagaacacacaagcagaggtcgaggaatacatgactaattcacctaaaatgctcaaaactcagctgatttactttgtaaagagtcttcattttaaatctcatacaaaactcaattttcttaaaagaaaacaatgctatttattaaaatgcctttgtaatatcttaaaatggatcaatgtacattccattctccaaaagcaggaaaaaatatgtagggtataaaatgtttattatattaaactgctgaattacccaaatgtctgtaagttgtcagctgaaagaaacaaaaagaaaaaaaaaaaaaaaaaaaaagctaaactaaagagataactcatctctcagatgagaagacatgcgaaaatatttggtttggagccacgacatcagagtcactggctagccccaccacagtttcaagggaagcactcaagaggcaaacgctccatgcaaaaaaaaacactctttgaccactagggtttggtactaaattatgtagaaccgctagccctggactggactatatactaaccaagaatattgtttttacaggccgggcgtggtggctcacacctgtagtcccagcactttgggaggccgaggcaggcggaccacctgaggtcaggagttcgaggcctgcctggccaacatggtgaaaccccatctctactaaaagtacaaaaattagctgggcatgatggtgggtacctccagctactcaggaggctgaggcaggagaatcgctcgaacctgggaggcggaggttgcagtgagccgagatcgtgccattgcactccagcctaggtgacatcaagtctctctctctctctctctctcttacaatattgactatcttggccaattagatcctaaagagtattatcaagagaagagtgtttctcccaaaagcctaaagcagtcagcctctaccagccactctaggcctgctctcatctgaccatatcccaattctggtctagccttgtaaggatttgccaggaagaagcagaggctagatactcttaacccagaggaaatccagactcgtcatactgcttcctcattacgcatcctgaacaggctagtaaaagatgatggccgcaacatttaagctctccgacggtcacggtgaacgctgcattgcctaccatttttgcccgagggtatcctggccccagtgctactggacaagcacgtccttggatacctgcggggcagtgagggaaggcgtggtaaagggtattcgaggtcctgtcagaaaccacagttctttggctgctgctagccgttctagtaagccaaacacacacacagtaagaacatgtcagttgtactttcgactctgtaggaaaaaaatccagaccagatccttgacttttatacaactgcctctctcttcaaacttcaatttcatttaaaagataaaaaagtacacttacctccagggtaataaatacacataaaagatttgtcagcgccaaaaaaagtttcttaattcttaagacccaaagacttgcactctaatagaacgcaacagattctctactagtcctttacaggacagaatgaaatcccctcagaaagccaaatgacatttttaaatgggtaataatctttgtaatgacaaataaaaatggaaagtacataatggtagaattagagcaaactgatggagtctgggggaagaatttatataaaaccctaattagaatggatgtgattgcagttaggtagtgccccttgtgaagaattgaaatccattaacctcctctatccccaagtgctattttagagggtttggggcataattaaaatcaaattagtaccaactaggctgtcaagctttttaagcaaactagctgagaagcagaagaggtgagaaatgcagaaaggtgagagacgatgacttggctaggatggcagtggagatggagagaagtagatgatttcagaagtatttaagagacaaagtcaacaggaaacagtgatagatattttttcactgcatgtggagaagcaagtatcaaggaccacagggtggactatggtagactcactgaaacaagaaacaaagagaaccaggattagggaaacagagtgtgggtttggtcttggacatagcaagtctgagatgtttttcagaaatccaagtttctcatatatatgagattggaggtcaaggaaagtaatctgagttggaggaacatataaatatgtgatttatttgcatggagttgggaaatcgtcatagaagtgaatgcaattaccagggtagggtgctgagtgagaaaggagctaaaggctgagccttatgcaaggaataccagtatctagtggtcagctacaggaaggtatgcctgaaaagtggagaacagtgcaaagaaatgaaagaggaaaccagcagtctggtgtcatggaagccaatgaaggagagtgaacaaaagagaaaggagggatcaataaatgccgctgaaaagatcatgtaggatgagggctgaaaatgcatgcaaatatcaaagttaaacatttactgctatctagaaattaggactgctattagttctactcagttagaaatagaggctgggcatggtggctcacgcctgtaatcccagcactttgggaggacgaggcaggcggatcacctgacgtcaggagtttgagaacaacctgatcaacatggtgaaatcccacctctactaaaaatacaaaaattagccaggggtggtggcaggcacctgtaatcccagctacttgggaggctgaggcaggagcattgcttgaacccgggaggcggaggttgcaacgagtcgagaccgtgctattgcactccagcctgggcgacaagagcaaaattccgtttcaaaaaaaaaaaaaaatcagaatacgaacacatcaaataatccagagtaaaaataaagcccaacagacacagacatcaaagtggtaatctgaaaagctaaatagggccaggcgtagtggctcatgcctgtaatcccagcactttgggaagccaaggcaggtggactgcttgagcccaggagtcaagaccaacctgggcaacacgagaccccatctcaaaataaaaaaatttttaaattaaaaaaataaaatgaaaagctatataaataagagcctcattttcattttgtacttcccttaacctcttgctccctgtttggactgacaatcccttctcaagagaaatcagtgggagaaaaggccaggtgtagtaaaaaagaacggtaatgcaggctgaggatccctaatccaaaatgcttgggatgagaagtgttttggatttcaatttttttttcagattttgaaatatgtgcactatatttacaggctgaacatccctaacccccaaatctggaacgctccaacgcacattgcctttgagcaacacatcagtgctcaaaggttgcagattttgaagcatttcggattttcggattaaggatgctcaacctgtatctgtagccagcttcttttgtacaacaacaaatacccagtagaaaagtttacaaagaatttgatctcgcaaaacttatgaaaactgtttagccaaaaaagaatttaaaatgatatacctatgtcaattcctcttcggagagtacttttgtcagaatcctggtgaccgatcagatcttctacccagtgaatatagttgagtctcaagggaactgtgggaattagtctctccaatggaatatcaatagaaagtccaaaatcttcccttaggagagtacacgtcagagctctgactgcttcggggtctttaaaattaaggctgaggaataaagaaaaggaagtaaaactgattagtaagattcactatgttgtacaagctctacggcaaacaggcagaaccaaatacccatccgaacctcccagggagatcacacacagttacacagagcactcatcccagtggcacatacacgagtgtttcacacagtcacagcttatgaaaatcagtacaatcctccaccaaaaacactgcatatccgtatatggagcacagagattaaatgactcggctcaaattcctgtctcgtcgtctcctcactgtgtgactttgaacaagtcatttacctctatgaaagtgtttcctctgctgtgaaatgaggacagtaataccaatatcacaatgctactgtgagatgacctgagaagtacttagcataatgtctggtgcataataactattttacaaatgctagctgtttttactcttaccattaacatcatctgacattagcattccttgaaaatcctacttaaaagtggaaagaagtcagtataaaaatgtttaatatgaacacaggataagatacttaaatatgacaaatattacagacatcaaattttaaatgtaactttttaaagctttatgaagtataattcacatactataaaattcacctgtaagtgtacaattgaatagtttctagtatattaacagagtcgtgcaaccatcaccaaaacccacttttagaacactcctatcaccccaaaaagcagaactcatgaccatttgcatgtctttcctcatttccaacgttagcctgaggcaaccattgatgtactttctgtcttcatagatttgccttttctggacacttcaagtaactgaaatcataatgaggtcttctggtcacttaacacaagtttgtgaggttcatccattttgtaacttgtcagtgtttcacttctttttatgggcgaataatgttccatagtaagaatgactacattttgtttatccattcaccagttcctgaacatctgggttgtttccatcacggtcatgatggattgttgaccatcacgaacaatgctgctatgaacatttacatacaagtctttgtgtggacatacgttttcgctgctcttgggtagacagtcaggaatggatcataagatatatttgtatttaaccttttaagaaacttgtaccaatataactatgttgatgtcaaaatactgctaaactgaaaatattaaaaaagaatatcaacagaccttatttataaacagagcagggtcttttttggtttttgtgggttttgttttgttttgttttgtttttgagccaggtcctcactgtctcccagactggaatgcacggtgtgatcatggctcactgcagcctcaccctcccaggctcaagtgaccctcctgcctcggccccacaagtagctgggactacaggtgcataccaccacactaagctttttttttttttttttttcgtagagaaaagggcccagccccttatgttgcctcaactggtcttgaactcctgggcccatgtaatcctcccgcctcagcctaagtgttgggattgcaggcgtgaaccactgcacctggccaacagagcattttgaagaaagcagaaagtcagtagatggggtatgaaagggaggagttttgaaactacttagaattctggcctcaaggtgtctggtcaggcaacaacacatcctcaaacagcttctggtctgtactatctccttttctgctcccctgcctggtcatcaaatgaccaatcattggaaaaattcaatgtccatcgggatgcttgagtgccaagacagaaggaagagtgctgtttccacccagcaaccatggaaacttcaggcaggtaccatcaacccaatctctctccactccccacagcaaaaatgttctagtatggaagttaggagatctggactccacttttggctctgcaatcaatttgccatggacgtaagtcacttcagttcttaggtctcagtttctccacctataaaagtaaaggactggccgggcacggtggctcacacctgtaatcctaccactttgggaggctgaggtgggtggatcacctgaggttgggagttcgagaccagcctgaccaacatggagaaaccccaactctactaaaaatacaaaatcagccaggcatggtggcgcatgcctgtaatcccagctactcaggaggctgaggcaggagaatcgcttgaacccggaaggcagaggttgcagtgagccgagactgtgccactgcacttcagcctaggtgacagagagagactctgtctcaaaaaaaaaaaaaaaaagaaaagaaaagaaaaaacatacctttcacaggaaaagaccttgcaaaaagatggatgatgggcagcatcagatttcatgaatatagatttgttatctatacaaaaattgcattccatacctgaatataatgatttcgtctgacctctaagaatgcttccagacactaacttatagggaggaaaatggaagggatgaagaatgaagctttaatataatctacagcagacagaaacaggatgactatagtggaccctgaagagacacagccagagcctggaagcaatgacgctcccatcgctacgagcatacctagagtgccagaccttggtttccaaatagcactccccaaaggaatcggagttccttggataaatggttattccagaattggaaagggaagtacaagataaacccgaagcattttattgtattagaaaacaggacatgctgaaaggaagatagaaacaaatcagaagtacactagaccctgcttgatggggctccctttggccaaatctgtgtcaatgtgaatgaagaaggctaacaaaggattatagaccatagaataaaatacatgagtccatccttaaatgtagaagtaatgaaagagttagataattacatttggcaatcgccatgctaataattgtttcaattaagaattatcaatggatgctaaaaataatgagtaaaagtttgttgaaaaacaggatattgggctgggcacggcagctcacacctgtaatcccaacactttgggaggccaaggcagatggatcacttgaggtcaggagttcaagaccagcttggccaacatggtgcaactccatctctatcaaaaattacaaaaattagccaagcatagtggcacatgcacctttagtcccagctactcaggaggctgagcttgcagaattgcttggacctggaaggggcagaggttgcagtgagcctagatgaagccaccgcactcccgtacggatgacagagtgagaccatgtttcagaaaaaaaagaaacaatgacaaaaaaaaaaaaaacccaggatatttacacagtcacaacgtacttccccacaaattatcaactaccttgataatgatatcaattatcagattatgaaaggataaaataacagtaaaatgaagaaatctgacagatacccccttaacgaagtgaccaaagttaatacccctaattatgaaacaaactggtattatatgcttcaacgatacagagaagaagagaaagggatacagcaagcaagacccaaaaaagcaggcacaattaaacaaaattcaggaaggagagagtggccatggttgtacacgtgtcaatatactaaaaaccaccaagttatgagagtgaattttatagtatatgaactatatctcaataaacaaatgaaatggaaaggagcaagaagttttaaaaagtaaagaaaaagtagtaaacataagagaggttaataatgaagacccccttgcagataactggggattctgaataagagaaccaaaggattagaataaagaaatattcaaagacatgattcaaggtaactttccagaaatagaaggctcactatgttcccaggaaaagatacagaattagaaataccaacacctaaaaaaattaccagactttaaggcttacaagaaaaaaaaatcctttagatatctaggcaagtaagctaaacaattgattttggggttagggacgcagtagggtacatgaggctgcttttagatgtccacacagcaccattcaatagtaaaagacaaaagaacagtgactacaaagcccttagaggaaaaaaagtgtgacacaattttatgctcagccaaacttactttgattataatgacaacagataaacattttgagtatacaggaactcaaggagtagagttttcacgagctctttgtgaagaaattcctaatggaaaaagttaatcaattgagataaattaaggaactacagtaagtcttcacttaacattgacaataggttctttgactttaagcgaaaccatacgtaacaaaatcaatttttttctcatcacttataaggaaatgacgttattagaggacctgctatacatcatttcattcatgtcgcagtttccaagaatctactggcaacactaactgaggacttactgtatagcaaaacaactggcactgagcagttaagccattttaaccagagagctaagatgaaaacacctgtgaaccgtggctacataataaaatgtaagtgtttacaaaccacgacaacatacacataatcaaaattcgggacaggaaacaggaaatggagagggagtgcctcagcttttatacacagggtcaaaagacttcatttaaggctgataaactaagtagcagagatagaagcacacatttaggaagataaactggctgggcccaatggctcacacctgtaatctcagcactttgggaggccgaggtgggcggactgcttgagctcaggagcttgagaccagcctgggcaacatggcgaaagcccgtctctacaaatagtacaaaaattagctggatgtggagtatggtggttgtgtgagcctgcggtccccgctacgcaggaggcaggaggatcacttgagcccaggagatcaaggctgcagtgagccaagatcccatcactgcactccagcctgggtgacagagtgggaccctgtctcaaaaataataataataataatattaacactagaagaatgaagataaataatataatcaaataaaatcaggggcagtaaaggaaaggtaggtgaaaatcagatcatatagtgttaaaaaaaaaaagcagcaagaacaaagcatgatataaaatgaatgtgaaatgaatgtaaatagtaaactcataatactctcagattagattacaaaagacaaaaccaactaattacaataaactgttttaaacaaaaactacggctaaaacaaaatgatccaaaggttgaaaataaaagcttaaccaaaagtatcccagacaactacaaataaaaatgaaaataggagttatttcacaacagacaaccttaatttttggatcaaaaggattaaatgagcaactatgtagaatgggttaaaaatataaaatgctgatggaggtcaagagaataataactttaaaaagtgactgactccatttctgtgggtgttggttttaaagaacagcttctataggacagtggaagcagaagtttattgcataaatatatgctagcaattaaaagtctcattaaaatacattaagtctatttaaaggggtattaagtttattcttagacatcagaattggatatgtattaattttgtcatttatgggggctaataaaagagggttaatccaggggcaacaaccacgaacacatttctgctttactcaatagcacgcaatggcctcaatcaattttcacataaaaaaaagatttgcactatctttgtatttcttactcgactaaaagcagtataaactcaggatcaacaagataaatgatgagcaataaaaaggtataaaatctataagcacttcagttttacttctaacgagaatattttattcctgtgaaatcagtcaagtgtgtgagaaaaatgggccaattccatttccttcaatgacataggaatgaaagtcaagttttacatatgacgaagaagttcacatctaagtaccatgctaaggcattcaaacacattcgtgtctttaactcgagaatggtagcctgacctattaactaaatttcactgctaaacacacaaaaggaaaaatatcccatgtctatgttcaaaggcttaatatctcaaacgtaaaatttcatggtaaaaggaatttgaggagaaaaaagttttcagaaaaatctctattaaagaaacttagtaacttacttataaaataagcttgataaagagtattatctaagggcagtaaatagtaacaaaagtattgctattttgcactggcatttcaaagtaattgtgaaaatcaggggtttcaaaatatttataaggaatagctattggtactactcaaaatgccagtccctgacaagataaagagcttgtgccagaatgtaaacaacacattaaaaagtcaattaaaccaaagaaatgtgaggtaacctaaacatacggcacaaggtccttatctctgtggacagtaacaaatagtctgtggttaagcagccagttcaataaccacttttagtagcactatgccagatgccacaaatgaccatttcaaaggttatgaccactactctgttctttttttttttttgagacgaagtttcgttcttgtcgcccagcctggagttcaatggcgcaatatcagctcactgcaacctccacctcccggcttcaggcgactcttctgcctcaacctcctgagtagataggactacagacatgtaccaccatgcccggctaattttgtatttttagtagagacggggtttcgccatgttggccaggctggtcttgaactcctgacctcaggcatactgcctgcctcggcctcccaaagtgctgggattacaggtgtgagccaccgcgcctggtgaccaccactctaagtagttaatgttgtgtggatttgccagcccggttttgccagctctctaatactttcaaacaaaaccagtgatccatgttttcatatgaaatggatctgattcttaagattaatatgggcaataaataataactgcaagccttatacaattcacaggctaatgggccgcaccctctattacaggagtccccaacccctgggccatggactgatattggtccctggcctgttaggacttgtgccgcacagcaggaggtgagaggcaagcaaagcttcatctgaatttacagccactttccattgctcacattactgcctcagctccgcctcctgtcagatcagcgcagcattagattctcacaggagcgtgaaccctcctgggaacgccgcatgcgagggatctaggttgagcactccttgaggatctaaagcctgatgatctgtcactgtctcccatcacccccatatgggaccgtctagctgaggggaaacaagctgcgggaaaacaagctgattctacactatggtgagttgtataattatttcattacatgaaataatacaacgtaataaatgtacaataaatgtaatgcgcttgaatcatcccgaaatcacccctcccccaccacaggtccatgaaaaaattgtcatccgtgaaactggtccctggtgccaaaaaggttggagaccactgctctactcaattgtaaacagtagaattgtaaagaaagttggggtacttggctactctacttttaaaagtgaaatataaaaatgtttattttgagcactactttgttcaactgaggtatacagaataggtcagaatttttaagaaactgtgacagctggcatgcattcctttattcattcaacaaatagttattaagtgtcaactatgtgccaggtattacgcaaaatgctagggatattgcagtaagcaaacacagacaatccctccctttctgaagcggacggtctggcggaggataggtattatccagaaatcacttaaatacctgtaaaactataactgcgacagatgctataaaagacaggtaaaagatactactgaccccccctaattagtggatctgccttaggaaggtcagaggaggcttccctgcacagacaactaagctaagaactgacaatggaagaaaaattcacaaaggaaggaacgaagggaagggaacgtggcattctagggtcctaggtaaagcaaaccgcaagtacaaagaccctaaggcagaacttctggagcattccaggtactaagagacagtcactgtgcctcaaatgcagagagcaaagtaagcgtatatagttcaaggtgaagctggggaggaaggcaggttccagattacgtagggcattataattagagtgaccatataattttatcatgtccagtctgaaactttctgaaagtgaaagaaaaactattaataatcacaccaggatactactctttttttttttttgagacagagtctcgctctgtcacccaggctggagtgcaatggcgagatctcggctcattgcaacttacgcctcccgggttcaagcaattctcctgcctcagcctcccgagtagctgggactacaggcatgtaccaccatgcccagctaattttttgtatttttagtagagacggggtttcaccgtgtcaggcaggatggtctcaatctcctgacctcatgatctgcccgcctcgacctcccaaagtgctgggattacaggtgtgagccactgcacccagctgataaaagtatattctatgttaaggatttaggtatggtatagaataaagttggaacaaagtggaagcaaaggctctaattaggaagctactgctatacctgcgttaagaggctagataaaggctgggtgtggtggctcacaactgtaattccagcactttgggtggctgaggtgggtggatggcttgagtccaggagtttgagaccaacctgggtagcatggtgaaaccctatttctataaaatatacaaaaattagtcagtgtggtggtgtggtggcatgcacctgtgttcccagctactctaggcgggggagtgggagtagggcgcggtactgaggtgggaggatcacttgagcctgggaggtggaggctgcagtgagccgaaattgtaccactgcactccagcctgggcaacagagtgagatcctgtctcaaaaaaaaaaaaaaaaaaaaaaaggctatatctagataaaggtagcaatggcagagatagggaaaagtgaaaggaattagagatattttggagagaacatctgtgagatttagcaacgaaatgatatgtgagctaagggatgctgtgtttcacatgagtctcccaaggttctagcttgctcaacaggataggcggtgccaccctaactgaagttagtaactctggcagagaaccgtttttgaagagaaatataaatctgagctgcatctgagacatttaagcggagatggagcccagagaagaggtgtgtagaaataaacatgtaagtgatttgcaaacaaacaagtgaagccctggcacggataacagcgatgaaggagaaaatataaagtgcgaaggaaagagagctgcggcgcaagctttgaaaactcctttaatagctgtatgcacagtcattacagaggaagttccacaaggagacaaaggaacaccagagtggaagaaggaaaaccagttttccagtgtggtgctgaggaggccaaggcaagagggtatccatgaaggataaaccaaccagcagagtgacctgctgctcagaaggcaacggagccctgaaaatcagagtcagtgacatgaggctgctggagaccttttaaagagctgctttggtagtggtagagttagaaaccactgtggaatcagctaaagattaaatgagggcagagtgtggaagctcacacctgtaatcccagcactgtgggaggctgaggcgggaggattgcttgagcccaggagttcaagaccagcctgggcaacaaaaagagaccctgtctctacaaaaaaaaattttaaattagccagatgtggtggcagacacctataatcttagctactcaggaggctgaggcaggaggatcactcagcacaggaggtcaaggctacagtgagctgtgatcgcatcactgtattccagcccaggcaacagagcaagacccagtctcaaataaaataaaataaataaaataaaataaaaatcatgcagtacaccttaaatatagacaatttcaactctaaaaaatgaaaaaaacctcaaaagatttgaaaacaggacctcaaaaagatatctgcacacccatatttactgcagcattaaccccaacagccaagaggtgaaagcaacctaaaggtccactgacagattaacagataaagcaaatgtggtatatacacaaaatggaatactattctgcctttaaaaagaaggaaatcccagcccggcgcagtggctcacgcctgtaatcccaacactttgggaggctgaggtgggcagatcacctgaggtcaggagtttgagaccagcctggccaatatggtgaaaccccatctctactagaaatacaaaaattagccaggcttggtggtgggcgcttatgatcccagctactcgggaggctgaggcaggagaatcgcttcaacccgggaggcggataggttgcagtgagcagagatagtgccactgcactccagcctgggcaacagagcaagactccgttccccacccaccaaaaaaacaaattaaaaaaaacaaaaaaaaggaaatcctgtcacgtgctagaacatggataagtctttgaggatatcaagctaagtgaaataagcgagtcaaaaacaacaaatactgcatgattctactttaaggtaaaggtatctaaagtagtctaactcatgaaaaggttctagaaatctgcacaacaacaagcacagggttaacacactgtacacttaaactggattaagatgggacattctacgttgcgtttctcacaacaataaaaaaaattaagtggccttaaattattattcgcgtactgtactgacatccttcccacttttcaactctctgatacagaagacttattgaagaaaatgtccactttttaaacactctcatgggtcaaataagcaattagatagtaatatacaaaaacacagatcctgaaacaatggaaacaaccattactgataaccctaagttaaccaaagaatccaaaatcctactggcaaaataaaaaattgtacctcgatcaatcaagctaaacttttcattcttttttttttatttttttttattttttgtagagaaggggtctcactatattgaccaggctgatcttgaactcctggcctcaagcaatagcttcccaaaatgttgtgattacaagcataaagcagcttgaagccaggccttcaggctgatcttttaaatgccattcctatgctaactaaagagcaactaacagaaaagaaaaatctagtcatccaaacacctctttgccctttccaggcatagttaagaatactgtgatttcggccgggcgcagtggctcacatctgtaatcccagcactttggtaggccgaggcaggcaggtcacctgacgtcaggagtttgagagcagcctggccaacacggtgaaaccccgtctccactaaaagtacaaaaattagccgagcgtggtggcaggcaactgtaatcgccatttaatagagacggtgaaatcccgtctctactaaaaatgcaaaaaaaattagctgggcgtggtggcacgtgcctgtaaccccagctactaaggaggctgaggcaggagaatcgcttgaacctgagaggtggaggttgcagtgagccaagatcacgccactgcactccagcctggatgacagagcgagactcaaaaaaaaaaaaaaaaacgaatactgcgatttcctagcaatgcccagtgacttaccctaaattcagtgaagcttaaaaagaaagaaaaataagtccagtgataaaagaggaactgttaaatttaagttttgtactacagaaaatttaggaacaacctaaaagtaatcagtatggaattggctaaataagctataatataaccatgcaagaaaatcctatacagttattacaaagaataagattaggctgatctacatatacttgtatgaagagcgttcctcaatatattacgtttgaaaaagaagttgagtagaagtatatatgtacattctgattgcattcttgtaaaaacaaaacaaaaagaccctgtataaacagatgcagaggaaaagtctggaaggtaagtagggactcgatatgcacgcaggtgggtagatgcgtcgggtggagacttccttcacctcacatttctgtattatctaaacacatttaattacataattccactttttttttaactaaatatgtaaactctcttcatacaagtgtatgtggatcagcccagtcttattctttttaatgactgcactgtactcgcttggggggatgtattacagcttttgtaactttatgcaaaatgcttacagtataatgtcaaatgggggagaagacgacgaatgattgtatgtaactacaactacaaccacaaaaattcctacgtatgaataaagacaagggcttagaaagatgagattacggactaatttcatcttttagggtgaaagaactgactttttgtatgtatgtgacattaccattataaatgtagttaggaaaaatatatttctctaattttcccattaaggggtctataatgtctgtatagtaaaaaataattccttttttgaaaaccagaaaacaggtccttggttctagaatatctgctctctgtaacacagtgacagcaatcaccaaaagatagtgctgcagctgtagggctcatcataaagcttcaagagacattttgggcaagagaacaatgtaattaatgttttccaagggccttcaaagaaagttgttgcttacataaacaattcttgttattcaaatatatatatatattcaacttacaaaatgatgaactagagcacacaatttattcacaaggaactatatcctaaaaaagtacaagacattaagctgaggctagtttcatggaaggaaataaagtgaacaccaatgaagagctgattgttagactttgttgtttattttcttttctgaaaagatccagacactagtctgagtgtcaaaaatacttttgttgggcaaagtcaagtcactcgacttcactagttaagaatctaggtcacgttagcactctgggacattcaaaaaacctgaacacagacaggcaagatcttttctcattctcatttcagagatcacagggaggcccaggaactaaaattagctctcacgtgaaaatcagcagtttattcattttcagtctttgttgtttgtttaacacattcagcttcccaaaatagcctattgtcaacaggctcatggccgatttccccagaatgactcctgctctaccactgatgaatacagtattaccattacagatggattttgaacagacacatttctgtaatccattgttaaaataacaatcattctaatcctgtagaagctgaacctgatgcaacaaaaacaaaagccaaaagcctcccagtgttactccaaggttggtttctagtctttagatggtcactgaggtgctaaaaatggtacagtctacccagcatgataaagcccttccatgctaggtctttggtttaaaaacaaatcagttggccgggcacggtggctcacacctgtaatgtcagcacgttgggaggccaaggcgggtgaatcacgaggtcaggagatggagaccatcctggctaacacggtgaaaccccgtctctattaaaaatacaaaaaattagccaggcgtggtggtgggagcctgtagttccagctactccggaggctgaggcaggagaatggcatgaacctgggaggcagagcttgcagtgagccgagatcgcgccactgcactccagcctgggcgacagagcgagacaccgtctcacaaaaaaaaaaaaaaaaaaaatcagttaaaataaataaaaataaaaacaaatagggctgggcgcggtggctcacgcctgtaaccccagcactttaggaggccaaggctgacggatcacgaggtcaggagatcgagaccatcctggctaacacggtgaaaccctgtctctactaaaaatacaaaaaattagccgggcgtggtggcgggtgcctgtagtcccagctactcgggaggctgaggtaggagaatggcgtgaacctgggaggcggagcttgcagtgagccgagattgcgccactgcactccagcctgggcgacagagcaagactccgtctcaaaaataaacaaataaataaataaaaacaaatcggttaagtgtcacattctattcaagctgaactgacagtgctgaactaaattgtaggctgtccctatggaactgattattgtgaaaaaacacaaactaaaatctaattgcaatggtcagatatgattataacaaagcagtgacatgcaggggagaaaaataagatatcagagtagcaatccttgccaccttacttataccaggcttaacaacaatatgagcacctaccatgaactcagtgtccatagaatgctagtcattctacacaactgctaaccttcatgaggatgtcctctcatccctccttttcaggtgagaagattcagtctcagtaaagctaagaaaattacataaaatctcacagctaaggccggccacagtggctcacacctgtaatcccagcactttgggaggctgaggcaggtggatcaagaggtcaggagtttgagaccagcctggccaacatggtgaaaccccgtctctactaaaaataaaaaataaaaaaattagccaggtgtggtggttggcacctataatcccagcaactcaggacgctgaggcaggagaattgcttgaaccccaggaggcagaggttgcagtgagccaagaacacgccactgcactccagcctgggcaacagagcaagactccgtctcaaaaaaaaaaaaaaaaaaacaacaaaaaaaacacagctggaactggcaccctcaagactgatacttaacaagactaacttagaaatgtcccctttccaaaacacccctgattcccttaagagaccacttaggagttaagcaaataagtgacactctgacccactgaaggtctaatgttttgtgtgacatttcttttccatcattagttgagtttatattttggtgattcttctttttttttttttttttgagacaatttcagctcactgcaagctccgcctcccgggttcatgccattctcctgcctcagcctcctgagtagctgggattagaggtgcgtgccaccacgcccggctaatttttttgtatttttagtagagatggggtttcactgtgttagccaggatagtcttgatctcctgacctcatgatccgcccgccttggcctcccaaagtgctggaattacaggcagccaccacacccagcccagtaattcttctttaatacaactgacagaattaaatacaaagccattgtaggctgggcgctgtggctcacacctgtaatcccagcactttgggaggccaaagcgggcggatcacttgacgtcaggagttcgagaccagcctaaccaacatggtaaaaccccatctctactaaaaatacaaaaattagccagctgtagtggcacatgcctataattccagctactcaggagactgaggcacatgaattgcttgagctcaggtggtggaggttgcagtgagccgagattgggccactgcactccagtctgggtgacgctgtgagactctgtctcaaaaaaaaaaaaaaaaccattgtaaaaatgaagaacattctaccagtgcagacaatcatcaacaactcctacctaagcaggaagggggaagatttctgggagctgccaggtcatttacaccaaggtagactctcctatgtctaccacaggttcctgcgaaccatgcgaggttgcaactataaataggctcacattgctctcatctctaaaagaaaaacaaggaagttctcctcaagactgccgtatcctcttcccatcgcctcacagacacatttcttcttccctgtaacaagtctttttaaaaaactttttaaagattacttttaatttcttttctttttgtttttgacagagtctcgctctgttgccctggctggagtgcagtggtgcaatcttggctcaccgtaacctctatctcctgggttcaagtgatcctcatgcctcagcctcccgagtcgctgggaggttaatttttgtatttttagtagagatggggtttctccatgttggccaggctggtctcaaactcctggcctcaagtgatccacccaccttggcctcccaaagtgctgggattacaggcgtgagccactgtgcccagtcaagatttactaatttttgtgggtacatggtaggtatatatatttagggggtatatgggatatacattgtatttttagcaaatcaaatgtttgtggcaatcttacatctagcaagtgtattggtgccatttttctaatagcacgtgcccactttatgtctctatgccacatgtcagtaactctcacaatatttcaaactttgttgtggtgatttatgatcagtggtctttgttttttgtttttttgtgtgtgtatgtttgtttttgttttagtgactcaggagactgaggtaggaggattgcttgagcccaggaatttgaggctacaatgagctataatcctaccactgcactccagcctgggcaacaggaaccctctctctaaaaaagaaaaacaaggccgggcgtggttgctcacgcctgtaatcctagcactttgggaggctgaggcaggcgaatcatgaggtcaggagatcgagaccatcctggccaacatggtgaaaccccatctctactaaaatacaaaaaaacagccaggcatggtggcgtgcacctgtagtcccagatactcgagaggctgaggcagaggaatcgtttgaacccgggagccggaggttgcacatcttattatttaagaaacattttaaggccatagatagtgattcctcagacagatctaggcaaagtaaattgaaaaccttctggaaaagattcagcattctagatgccattaaaaacattcaggattggccaggcatggtggctcatgcctgtaatcccaatactttcagaggtcgagagaggcaaatcacttgagcccaggagttcaagaccagatggggtgaaacaacaacgacaaaaaattagctgggtgtggcagcacacacccagtcccagctacttgggaggctgaggtaagaggatcacctgagcccggggaggttgaggctactgtgagccacaattataccactgcactctagcctgggcaacagagtgagaccctgtctcaaaaacacaaaaaataaaagaacatttgggattgatgagaggaggtcattatcaacattaatcgaatatgaaaaagatgatttcggctgggtgcggtggctcacgcctgtaatcccagcactttgagaggccaaggtgggcggatcacgaggtcaggagttcgagaccagcctggctaacatggtgaaacactgtctctactaaaaatacaaaaattagccaggtgtggttgtgcgcacctgtaatcccagctagccaggaggctgaggcagaagaatcccttgaacccaggaggtggaggctgcagtgagctgagatccggccactgcaccccagcctgggtgacagagaaagactctgtctcaaaaaaaaaaaaaaaaagaaaaagattatttcaaccctcataggtgagtctgacgggctcaagacttcagcatgggaagtaactgcagatgtgctgaaaatagcaagagaactagaattaaaagtgaagaccggccgggcgcggtggctcacgcctgtaatcccagcactttgggaggccgaggcaggcgggtcacttgaggtcagcagtttgagatcagcctggccaacatggcaaaaccttgtctctactaaaaaatacaaaaattatttgggcgtggcagtgcacacctgtaatcccagctactcaggaggctgaggcaggagaattgcttgtacctgggagctggaggttgcagtgacctgagaccacaccactgcactccagcagccagggtgacagagcgactctgtctcaaaacacacatgcacacacacacacacaaaacaaaacaaaaaaaaagaaaaaacatcctacacaaatagtatttttatctaattgtgttcaaggcattcatggatcctctcaaagtccctaagttcactcttctctgtatatttctgtctacttagttagaaatatttaaaaaaaagttccaaattacgtcaaacagtgttttttagagatgggtctcaccttgtcgctcaggctggagtgcagtggtgtaatcataagttcactgcagccttgaactcctgggatcaaatgatccccccacctcagcctcccaagtagctgggattacagacgtgcaccactataccctgtcaaacatgtttttaaaaatttctatacttttcaaaatgctaagtcttcatcttcactgaaagttatttatccacataattttccattttgatgctttttgccttcttttctactttatttgatttagggggaactctcatttacctacttatttttgcgcatccctttactttcatttctctgtaattccgttttaggtatgtgctatgatctgaatgtgtcccccagaattcctttgttggaaacctaatccccaatgccaacagtgttaggaggtgggacctagtgggagaggtttaggtcacgagggctttgcccttatgaatggattaatgctgctgtttaaaaaaaagcttgcagaagtgggtttgcccccttccaccttccaccctgtgaggatgcagcaaaagggcccttaaccagatgccagggccttgctcttggacttcccagcccccagactatgagaaataaatttctgttcttcataaattaccagtctcatgccacttatgtatggcatatcgttttgttgttgttgtttttcttttttattttcttgaggcagactcttgctctgttgcccaggttgcactgcagtggcacaatctcggctcactgcaacctccacctcctgggttcaagcgattctcctgcctcagcctcccgagtagctgggatcacaagtgcgcaccatcacgcctggcttatttttgtatttttagtagagacggggtttcaccatgttggccagactggtctcgaactcctgacctcaggtgatccgcccaccttggcctcccaaagtgctgggtttacaggcgtgcgccactgcacccggcctttttttttttttttttttttttttgagataggatctcactctgtcgcccaggctggagtgtagtggcacaatctcagctcactgcaacctctacctctcaagctcaagcgattctcgtgcctcagccttctgagtagctgagattacaggcatatgccaccacgcccggctcatttttgtacttttagcagagaaggggtctctccatgttgcccaggatgatctcaaacttctgagctcaagccattcgctggcctctcaaagtgctgggaatataggcatgagccactatgcccggcctggcatatcatttaatagagaaattattctcatgcagtcaacaaatattaactcaatgtttgtgacttgccaggtacctttagatatgttgtaaaaacacatctgttaggtctgcttcagactgacaggttttttttggaaacaaggtcttgctctgttgcctaggctggagtgcagtggcgcgatcatggttcactgcagccttgaccccctgggctcaagcagtcctcctgcctcagcctctgaaagtgctgtgactgcaggtatgaggcactgcgcttggccttttaaaaaatatacctcttaggcccggcgcggtggctcacgcctgtaatcccagcactttgggaggctgaggtgggcagatcacgaggtcaggagatcgagaccatcgtggctaacacggtgaaaccccatctctactaaaaatacaaaaaattagcagggcgtggtggcgggcacctgtagtcccagctactcaggaggctgaggcaggagaatggcgtgaacccgggaggcagagcttgcagtgagccgagatcgcgccactgcactccagcctgggcgacagagtaagactccatctcaaaaaaaaaagagatcgagaccatcctgcccatcatagtgaaaccccgtctctactaaaaatacaaaaattagttgggcatggtggcatgtgcctgtagtcccagctactcaggaggttgaggcaggagaatctcttgaacccgggaggcagagcttgcggtgagccgagacagcgccactgcactccagcctggtgacagagcaagactctgtctccaaacaatgcaaaacaaaacaaaaatcttaaaaatcctaaccatcagctgggcgcggtggctcacgcctgtaatcccagtactttgggaggttgaggtgggcagatcacttgaagtcaggagttctgagaccagcctggccaacatgttgaaactccgtctttactaaaaatacaaaaattagatggccgtggtggtgcgagcctgtaatcccagctactcaggaggctgagacaggagaatcgtttgaacccaggaggcggaggttgcagtgaaccaagatgacattactgcactccagcctgggcaacagagcaagactgtgtctcagaaaataatataaaactttagtggatgaggatggggatgggcaaggcacaagaatcctccataccacgcccttaagaaaaatttcaaactcctcagtgggccttataaagcaccacaaagtataaccatccccagcccacctcctcctgtctcttgtccactgcaccccagccacgcttcacttcttcagttcccctctgcccagtattctttgcacatgctgctgcctctgcctggaatactcttctttctacctggctcactccactcattccttaaaacacaaccaagagaccatttcggtttcaaatcattctctaaatcccaaagtcagggtacggtctccttttcatgtgatcccactgcacatcccccggattctcccatactaaaaggttaacggcttatgtatttgtccattttccccactagtgtataaactagcgtgtgactgtggcagtgacatctttcttgttttttaaggctttcctagaactgagcacaatgtggctaatcaataggtttttgttaaatagctgattaagtacaatagtaagtatagagaggaaacaaacaatgacaaaactatatcttttttttttttttttttttaattacaggatttcgctatgttgcccaggctggattcagactcctggactcaagatcctctcacctcagcctctcatgtagctgggactacagatgcacagtgttgcaccccactaaaatggtatctttcctaaagctactaggatcaacatccacgtatatcactatgaaacaatgacttacaaacaatgagagagatgttataaacagagaaatcccaattcaatctctttagggtaagtgactccaaagtaaggtgccaaaggtgattatggtatccaaagaaaatacctgaagtcctatttaaatatatttttaatttctattttgaaatatgttttcaaatgtacttaatatattaacacagtaagtagtacaagcattcacatataggctgtgctcaatttattctatttttttgagatagagtctcattctgttgcccaggctgaagtgcagtggcatgatctcggttcactaaaacctccgcctccccagttcaagcaattctccctcctcagtctcctgagtagctgtgactatagtgtgcatcaccacacccagctaattttttgtatttttaatagagacagggttttgctttgttggccaggctggtcttgaactcctaacttcaggtgatctgcccacctcggcctcccaaagtgatcttaacccttatacttgggtgtgggtggagagtttcacagatccctttgagaatgtgatgacagctaaggattatctgtcagaaaaatgaacataaatatttgtttgaactcctgtatgattttaagggttatcttggcttccaggttaagtcttgccccagggcctccatttctaaagctataagaagagggcttagagtaaagaagaggtgaagaaaatgcctcaagccctatgatcctaatcttctttttttcttttttcttttttttttgagatggagtctcagtctgtcacccaggttggagtgcagtggcacaatctcggctcactgcaacctccacctctcaggttcaagtgattctcctgcctcactcagcctccggagtagctgggattacaggcttgcgccaccacacccagctcatttttgtatttttagtagagatgaggttttcaccctgttggtcaggctggtctcaaactcctgacctcaagtgatccgcccaccttggcctcccaaagtgctgggattccaggcgtgagccaccgcgcccggccactattattctttcccttcctttttctcctctaatcctgctcctcttccttcccatagctgaatcaccacgcctctctccaggcaggctgggaatttccaattccctctgtaactcgcagagttgaggaatgcagttagagatagttctttctcagaggtataaaagacacatcagtcattcccatatagttatcataattttgccatttcctgaaacacttatactattattttcttaatttaaaaaaatcaaggccgggcacatggctcacacctgtaatcccagcactttgggaagccaaggcgggcggatcacctgaggccaggagttcaagaccagtctggccaacatggtgaaactctgtccctactaaaaatacaaaaattagccaggcgtggtggtagaggcctgtagtcccagctactcaggaggctgagacaggagaattgcttgaactcaggaggcagaggttgcagtgaggcgagactgcaccactgtactccaccctgggcaacagagactccgtctcaaaaaaataaaataaagtaaaaataaaaaatcaactttctggcttggtgtggtggctgtaatctcagaaccttgggaggcaaaggagggaggaccacttgaatctaggcgtttgagaccagcctgggcaatatgacaagaccttgtctctacaaaaataaaaataaaaatagctaagcatggtagggcacacttggctatttttatctggggaggctggggcaggaagacagcttgagcccaggagttcaatgctatcacaagctatgactgtgccactgcactccagcttgggcaacagagcaagatcctatctctaaaaacaaaataaataaataaaaataaatcaacttcttaaatttagtaacatcttaaataataatatctgtgaaatcagtcctgatgtcctggttattattttcctgcctcacatcaaaataaacacacacttattaaaatatctttaggccaggcacagtggctcacacctgtaatcccagcactttgggaggccaaggtgggcggatcacgaggtcaggagttccagaccagtctgaccaacatggtgaaaccccgtctctactaaaaatacagacgttggctgagtgtggtggcgggcgcctgtaatcccagctactcaggaggctgaggcaggagaatcacttgaacctgggaggcagaggttgcagtgagccgagatcatgccactgtactctagcctgggcaacagagcgagactttgtctcaaaaaaaaaaaaaaaagtgtttagatcctcaccagtcactaagttttagatcacaaagagcacaatcgtaaatctctgaagttactctgggatttccgtagggtaagcaacaatttggacatcaagagaatttttttttaagccagaaggaaacttaaaagcatctggtccattcctctaatgttatacattaaaaagctgagaccaagagaggttaagtgatttgtccaaggtcgcatgggacgtttaatcaaatgtctaagattaacactcaggtgggctttctattacatcatatccatttgaatcacacaagaataacagtgatttttcatccgttacctacctcactcttccattcagatttatctgaacatgctgcttaaaatctggatatttggatgccagatatgcaaagtcaggaggtttgtccttgtatctatttcttgcatgcattgatttactcagagccatcttaaggagagaaagagagaaagaaaatcagcatatttattaaaaaccattaatgggggccgggtgcggtgcctcatgcctctaatcccagtactttgggaggccaaggtaagtagatcacctgattcaggagttcaagaccatcccatcctggccaacatgatgggatgaaagcccgtctctactaaaaatacaaaaagtagccaagtagccgagcatggtggcgggagcctgtaatcccagctacttgggaggctgaggcaggagaattgcttgaacccaggaggtggagggtgcagtgagccgagatcacgccattgcactccagcctgggcaacaagagcgaaactccgtctcaaaaaaaaaaaaatcagtggggaaagctgtggatgccaagttaatagttacagccaacatgtctttgccgatcaagtgagaaagtagaaatcacatttttaaaatgcatacaacaaataagcacatgaagagatggtgaacatcattagtcatcagggaaatacaaatcaaaaccacgtgagacaccacttcatacccactaggatggctgctgtcaacaaaaaaacaaaaataaaaaattaaaaaaacagaaacaacgagtgttctgcaaggatgtgaagaaattggagttctcatgcattgctgttgggaatgtgaaatggcacagctgctgtcgaaaaacgcttggcggttctttaaaaagctaaacatagaattactatctgattcagcaattccactcctaggtatattcccaaaagaactgaaaggaggaactgaaacagatatttgtacagcagtgttcatagtagtatcattcccaagagtgaaaaggtgggaaacaatctgagtgtccatcagcagatgaatgtggaccaacaaaatacagtatatccatacactaaatatggatcaacaaaatacagtatatccataccctaaatatggatcaacaaaatacagtatatccatacactaaatatgaaaatacggtatatccatataataaatatgggtcaacaaaatacggtatatccataccctaaatatggatcaacaaaatacggtatatccatacactaaatatgggtcaacaaaatacagtatatccatacaataaatatgggtcaacaaaatacggtatatccatacactaaatatgggtcaacaaaatacagtatatccataaaataaatatgggtcaatgaaatacagtatatccatacactaaatatggatcaacaaaatacagtaatccatacaataaatatagattaacaaaacatggtatatccatacaataaatatggatcaacaaaagatggtatatccatacaataaatatggatcaacaaaatatggtatatccatacaataaatatggataaacaaaatacagtatatccatacaataaatatggataaacaaaacatggtatatccatacagtaaatatggatcaacaaaatacggtatatccacacactaaatatggatcaacaaaatacggtatatccacacactaaatatggatcaacaaaatacggtatatccatacaataaatatggatcaacaaaatacgatatacccatacaatacatatgatcaacaaaatatggtatatccatacaataaatatggatcaagaaaatacggtatatacatacaataaatattatgcagccctaagaagaaatgaaattctgatacatgctacaacatggaagaaccctgaaaacaccatgctaagggaaataaaccacacacaaaaggacaaatattgtatgctttcacttatatgaggcacccagtagaggtaaatttattacacagatggagagtggaatagaggtgatgaggagctggggagggaagaatgaggagttactgtttaataggtacagagtttcactttggaatgatgacaaagttctggagatagaggtgatggttgcacaagagaatgaacacatttaatgtcactgaatggtacacttaaaaatggctaaaatggtaaattttatgttatgtatatttttccatgattttaaaaatgcagacaacgtaagagtgagtctttttttttaaatcaagggaagaaagctgaaaagtattcctttaagagcatcaaagtgacagaacacagtctgtatatatgatctataaccaaggatattagttagaggttagttgtgttttgttttgtcttgttttgtttgttctgagacagtgtctcactctgtcatccaggatggagtgcagtagcacaatcatacctcactgcagcctcaatctcccatgctcaaacagtccttccacctcagcctcccgagtagctgggactataggtatgtgccaccatgccaccacgcctggctaatttatttttaattttattttttgtagagacagggtctccctttgttgcccagattggtttccgactcctgagctcaagtgatcctcctgcctcagcctcccaaagtgctacgactacagacatgaaccatcacacccagcttgggggttagtttttacagtatccttacaaggactgaatatttggtagtgtaccataacatcaccaaactttgaaaaaatatctttgattccaacttaaagtttcaatcttgtcattcctaggtagctaaaaccaaatgaaaacgaacataattttgtcttcttccagattacaacaagaaataaaagcaaatgtacttatatcaagacataaacactgaaagagaaactattataatggtttagtaaatctccaggtagttggtaatttaaaaaatattttactattatatatatatatatctctctctgggtggcaagtgacttttattttcttaatatctttattttttaccttttaaataatgattattcttctaaacaatattatgttagccaaaaatctaggagtcagttgatagtttctcatatccaagaaatcaccacttctgtaggttttacctgctaaatacctcttaaatccactctttttccctgtccccaacaatgtcaagcccagaggcattttttttttttttttttttttttttttttttttttagatacatggtttcgttatgttggccaggttggtattgaactcctggcctcaagcaatcctgccacctcagcctcccaaagtgctaggattatagttgtaagccaccacgcccggccagaacagcctttttatttacttacttttatttccttagagactacattgcccaggccagacttgaactcctgagcttaagcaatcctcccacctcgggctcccaaatggctgagactacaggtgtgcaccaccgcacctggtttacagtagcctcttaattggtctccctgcatccactcttgttctcaccatccctccttccacctcgtagtgatcatttccaaacacaaatctcagtatgtccttctcctatgtccacctgctcaaaaccttactcttaggataaaataaaaaaacatcacttcagcctacatgcaaggcactacatgacctggccttgcctatcttttcaccatcagtttaagtcacatgcccttgctctttgtgtccttctaccctgaccacaggacctttatgcaggctattcttttttttttgagacagagtctccctctgtcaccaggctggagtgcagtggcgcaatcttggctcactgcaacgtctgcctcccgggttcaagcgattctcctgcctcagcctcctatgcaggttattctttttatctgtaacgttttttcctccctctcttcagtcggcaaattcttagtcattcttgggctcacagttcaagcacctcttcttcaggaagatctttccttccctaatctccccagttaagacaaatcctctccctctccctccccctccccctccctctccctctccccacggtctccctctccctctccctctccccctcttgccacggtctccctctgatgccgagccgaagctgaactgtgctgctgccatctcggctcactgcaacctccctgcctgattctcctgcctcagcctgccgagtgcctgcgattgcaggcgcacgccgccacgcctgactggttttcgtatttttttggtggagacggggtttcgctgtgttggccgggctggtctccagctcctaaccgcgagtgatccgccagcctcggcctcccaaggtgccgggatggcagacggagttgcgttcactcagtgctcaatggtgcccaggctggagtgcagtggcgtaatcgcggctcgctacaacctccacctcccagctgcctgccttggccccgcaaagtgccgagattgcagcctctgcccagccgccaccccgtctgggaagtgaggagcgtctctgcctggccgcccatcatctgggatgtgaggagcctctctgcctggctgcccagtctggaaagtgaggagcgtctctgcccggccgccatcccatctaggaagtgaggagcgtctctgcccggccgcccatcatctgagatgtggggagcgcctctgccctgccgccccgtctgggatgtgaggagcatctctgcccggccgccccgtctgagaagtgaggagaccctctgcctggcaaccgccccgtcggagaagtgaggagcccctccgcccggcagccaccccgtctgggaagtgaggatcgtctccacccggcagccaccccgtccgggagggaggtgggggtcagccccccgcctggccagccgccccgtccaggaggtgaggggcacctctgcccggccgcccctactgcgaagtgaggagcccctctgcccggccagccgccccgtccgggaaggaggtgagggggtcagccccccgcccggccagccgccccgaccgggaggtgaggggcgcctctgcccggccgcctctactgggaagagaggagcccctctgcccggccagccaccccatccaggagggaggtgggggggtcagccccccacccagccagccaccccgtccgggagggaggtgggggggtcagcccccagcccggccagccgccccatccgggaggtgaggggtgcctctgcccggccgcccctactgggaagtgaggagcccctctgcccggacagccgccctgtccgggagggaggtgggggggtcagccccccgcccggccagccgccccatccgggaggtgaggggcgcctctgcccggccgcccctactgggaagtgaggagcccctctgcccggccaccaccccgtctgggtggtgtacccaacagctcattgagaatgggccatgatgacaatggcggttttgtggaatagaaaagggggaaaggtggggaaaagattgagaaatcggatggttgccgtggctgtgtagaaagaggtagacatgggagacttttcattttgttctgtactaagaaaaattcttctgccttgggatcctgttgatctgtgaccttacccccaaccctgtgctctctgaaatatgtgctgtgtccactcagggttgaatggatgaagggtggtgcaagatatgctttgttaaacagatgcttgaaggcagcatgctccttaagagtcatcaccactccctaatctcaagtacccagggacacaaacactgcggaaggccgcagggttctctgcctaggaaaaccagagacctttgttcacttgtttatctgctgaccttccctccactattgtcctgtgaccctgccaaatccccctctgcgagaaacacccaagaatgatcaataaaaaaaaaaaaaaagacaaatcctctattataacatctcctagcaataaatatttttcttttgcaatctttgttagagacataattttacatagtcataaatctgtcaatgctatttcagatggttttttgacagcttcctacactggaaattaaaccaatttcagaaaagaactgttgtcttcattccagacttttccaaatcacatatccaactgcctaccatatttctcacttgaagggctcaaaaatacatgtacaatatgtgcaaaattaaatcacttctacccaccccaaactggtccttctcatcttccctatctcaccaaatgcactgctatctttcttgtgataaacacatcaaaaatcttcaacaccttctccatgctgcctcccccattcacaacacaccaggtcctgaatactccatctcccaattatttcttgaccttatcccacttttcacccttcacaacaccacctctctggcccaggtcattatcatgtctttcttgggttgctctaagagtctcaaactgatctcttcataaacactcttgccctctaccagccacttttcactcagcagacaagccactccccccatgcaaatgtgaacatttccttattaaatcccttcagtggcatcccaaagctattaagctaaaaaagtctaaaatcattaaaaaggcaggcataatccaggccttatctgtccctccaacttcatttgttgccactttccccttccagacatactggtcttcttccattttctctgctgcatggtagtctgtctcaccatctcctattcttactgcctgtaagactctcctcaacctcccaccatcgcctttcacctctgaaggtccactagctactcaaatcacaccctaggcatcatttactcaggcagcctttctctgaccccacaatccaatcagatgcccatctacacgctttcaaagcaccctgtgctgcttctccctcagagatcttcagtttactactgggtgtgtaattaatttgcatatgtcacacatagacctgcaaccatatccatcctagtctttactatacccccagcaacctgtatacaataaatattttttgagtaaacaattcagaatttgaggggattagtagtcacctgaaagtttttcagcatactgttactacattttgcccctcacactatgactaaaaatgactatatacctgtcttaatttcctagcattgacataccctttactgaccatcaggaaagaggggagcataaaactaggatggcccccagttctcaagaaaacatcaactgggcaaggtggtgcatgcctgtgttcctagctactagggatgccaaggatagcttgagcccaggagttccagtccagcctgggccacacagtgagaccctgtctcaaaataaacaaatacaaataatagactttattaaaaagaaaatatccaaaattaaagtgttggccgggcacagtcgctcacgactataatcccaacactttcggaggccaagactggaggatcacctgaggtcaggagtttgtgagaccagcctggccaacatggagaccatcctggccaacatagtgaaaccctatctctactaaaaatacaaaaattagctgggtgtggtggcatgtgcctgaagtcccagctacttgggaggctgaggcaggagaatcacttgaattcaggaggccgaagttgcagtgagccaagatcacgccactgcactccagcctggtgacagagcaacactccgtctcaaaaaaaaaaaaaaaattagctgggcgtggtggtgggtgcctgtaatcccagctactcgggaggctgaggcaggagaatcacttgaacccaggaggtggaggttgcagtgagccaagatcgtgctactgcactccagccttggtgacagtgaaactgtctcaaaaaaaaaaaagaaaaagaaaatgttctttcttgtgattctggcaagcaacaaaaaaaagtaaactaagagtaatttctttaaactgatggaaaatattttcccaatttatgggggacatgtgacatttatgcggtatttgttccacgcatagaatgtgtgctgatcaagtcagagtatatggggtattcaccactttgagtattttttatatctatgtattggtaacatttcaagccctctcctagctattttgaaatatacattgttgctgactttagtcaccatatcctaacagtgacttcaagagacagtggcatgttagggctctgccacacattaaggaaaattctacagactacatagctgacatcagtgcacacacaacataatactctgaatatatgtgaaacaaattaaattacagacatggcagattcgattcatttcctacattattcaacttttctggtcagaacagatacagaatgagtaaatacaaccacttcttttctaactaacctcccaatataggcaatgagttcttagctaaatataacctattcttcagagtttaactgggcatcaattcttttttttttcttcttgttgagacaaggtcttccattctgttgcccagagtgcaatgatggaatcatagctccctgcagcctccaactcctgagatcaagcaatcctcccgcctgagcctcccaagcagctgggactacaggtacagagcactgcacctggttaatttacttcattttttgtagaaagggagtctggctttgctacccaggctctagcttcaattttctacacagaatttacccatctggcattccatatattttacttactttaaaaaatctcccgtcagtaagtttcaagagggtaaatattttgtctgtcttgttcaccgcatatcccaacgcctaaaatagggcctaagagagtaggcactcaagtatttgttgattgaaaccacgatagaactcttccctgtctggaccaccgacacaaagcaccctcactgagtttcaaaaaaagctcagcccatggactggaacttttcttcccggttacttgagtcagtccagaaagccacagttaatagtagaaccctgagaatgaggctttccctttttttttttttctttctcatctccatgcttctgtttccttggttcctcttgaccattaaccctcttcaactaccactctcttgatacacagcctgtaaaacagtctaaattccaatttcagaacttcaaattctttctgcacagatccctcccacttccacaccaatctacatcttctctcttcgccttctctcataaatccgacgtttcccactagtcctgccactgccgttctttccatgccctcattttatcagctcagtttgtcttcccgcctcagttttggatctctctaaacctcctaaacaccggggagtctttcctacttcagtcctagtctctattctattcgccaactcctcccactcatccactctcaacacccccgcgtgcgcacacacagccacatcaggtctcccctcctagaccccgaagtcggcacctcactagcccaaaactcaagaatgaggaacccgtgtgatccacgggttaagtgacccatgatagtaaatctgcgtgagagatataagtgacccacctctgaggccgaggttcctgccagacgtcgtgtctggcgtgggcctgtacaaccctagaatcttaaagcagccgcatagcgaagctcctagaaacgcagatgatacgctcccagcgcgccgccatcttgtgaagccatctagcctcgtgattggacacatccctctcgcgcgacctgtggctgatcttgaagaaagaagaaaccctcgcgacacctggggtttgctgctcctaacagaaggcgcgggggcgtggtgacgagcggagtcctttgaggtatggcaggaggaggacatgcgttcgaattcgcgagaaaacttatttaaaagaaaaagaaacaagttttccgggccctgctgcagacttacctctcacactcactgggattgggcaggttatgaagatgagggtacgagacttgggtgtgatggcgtgcagtgagccctttttgtgcaacaggtgtgtcctcagccgatgtctcactcactgaattgtaagagatataagcctgtgggttggggaagagtactctcgtttacagcgaaagaactgaggatccggccggacgcggcggctcacgcttgtaatcccagcactttgggaggctgaggcgggcagatcacctgaggtcaggagttcaagaccagcctggacaacatggtgaaaccccgtctctactaaaaatacaaaaattagccgggcgtggtggcgggcgcctgtaatcccagctactcgggaggctgaggcaggagaatcgcttgaatccgggaagcggaggttgcagtgagccaagatcgcaccactgcactccagcctgagcgaaagagcaagactctgtctcaaaaaaaaaaaaaaaagggggggcctgcctacgtcctcgtcgttaatgtgaacgcttctggcaaactattaccataaaattgggagatagtaaggattaaggaatggagacttatacacaagtgagtaccagtagtcacccaaggaaagctgaggaggtgttttcataatctgttgtgtaacaaaccgccccaaaacgtaagacttaaaacaaccaccattttacttgctcacagttctgcaatctgggctgggattagcccacccgttctgctggtcttgccagtggtcatagcaacaagtgggggctggttccgctgaaagaactgggtctctctccctgtagtccaagttctctccctgtccacgtggcctttccatgtaatttgtctagcagagtaggatgacattttttttttcccccgagatggagtttcttattgcccaggctggagtgcaatggcgccatctcggctcactgcatgcaacctctgcctcctgggttcaagcgattttcttgcctcagcctcccaagtagctgagtagctgagattacaggcgcccgccaccatgcccagctaattttttgtatttttagtagagacggggtttcatcctgttggccaggctggtctcaaactcctgacctcagatgatccacccgcctcggcctcccaaagtactgagattacaggcatgagccatcgtgccccgccagaatacttcttacatgttggctcggggctcccaaaagggcaaaagtggaagctgccaggccttcttaaagcgtaggtgcagaactagcaccttggctatattcttggttaaagcaagtagaagggctagccccaattcaaggggaggggactatgccagggtcccttccaatactggaaggcatggttcatttcagcaaccaatgtaacatattaccacagaaagttttccatctttggttggtagtggctttgatactagttatggcattttatttagtgcatgctgctggaaaggtaaaagaaaagatggcctcggagataggactggtggggttgaagtgattgtatttaagatattggtaactttctgttagctccaaagagcaacccagtttacctgtaggtcgggccagagagaccctagtagcactgcagctgggaaacctggcctttaatcctgcccccaccatttactaaccctgtgagtatgggcaatttgcttaaacacttgaaggcttagtttgctcaatattacaaaataggataataatctcatggggttgtgagaattaaatcagataatgcatataaaacagcagaatgtctagtatatagtgagttcctaataataataatattgttccttataacttctctggtcagttttttttaagtattccataaagataaaacattttaataactgaaaatttttaaataatttaaataatacataaagatatcagaaagacaaaaattatctaaaatctcaccactcacagccaagcaccatcaaatttgggtaaccttactactaaacctctatatctcataaggatatataaccaaataatttttatacaaataataatatatatttgtatatatatgtaattacatatatatacacacacacacatgcacatatactcaaatataactcttggagattcttccacttccaacaatatagctctttattgttctttgtgataggtgcacagtattccattgaatgcatataacacttttttttttttttttgagacagagtctctctgtcgcccaggctggagtgcagtggcgtgatctcggctcactgcaacctccacctcctaggttcaagcgattcttctgcctcagcctcccgagtagctgggattacaggtgcccaccaccacgcctggctaatttttttgtatttttagtagagacagggtttcaccatgttggccaggttggtctcgaactcctgacttcgtgatccactcgcctcggcctcccagagggctgggattataggcctgggccaccgcacccagctggatataccactttttaaaaaactaattcgtgcccaggttgggttggccagacctataatcccagcactctgagaggcgaaggcaggtgggtcacttgaggtcaggagtttgagaccagcctggccaacatagtcaaaccccgtctccattaaaaatacaaaaattagctgggcgtggtggcgggcacctgcaatcccagctactcgggaggctgaggcaggaaaatcgcttaaacccgggaggcagaggttgcagtgagccgagatcgcgccattgcactccagcctgggcaacagagtaagactccatctcaaaaacaaacaaacaaacaaacaaacaaacaacaacaaaaaaaaaactaattcccctgtggatggacataggttctttccaatgtatctggtatgacctattcccaaatattgtggtacaatgataaatacatatccttgaaaacttttttatataaaatgaaaattatctggagactccacagaatagattaacaacatctgcctttttccaaatttaccctgaaatgtccaaggatgtaattggtcagagaagtctctcaaacttccataccacagcaaggacagtgcagatgtccaattagccagttacatcctttgctacctctttgtagcaggaaactgattctgcacatccagtgaataatgctgctaattatgaaatgttgcctagcaagttatcagagctgctttcagcatcagctgcctactggactggaatcaatccttgagggcatcagactggactccctcttgactgaaattaattatttcaaggactttgtggcccttccctgtcactgtcctttggccacagccagcctgtcaacagccacaggtctctctaactttgtatttcagaaagtaatcattgagtatcaatttcttctagcttagaagactctagcttccttatgtaaatgtatccacctccttcttagggaccaagtttacatatcagggatctaatagccattatagttgtcacaaaagctatatccaggcaggtgcagtggcttacacctgtaatcccagcactttcggaggctgaggagggtggatcacctgtggtcatgagttctagactagcctggccaacatgatgaaaccccgtctctattaaaaatacaaaaaattagtcaggcggggtggtagatggctgtaatcccagctacttgggaggctgaggcaggagaatcacttgaacccaggaggcagagattgcagtgaactgagatcacgccactgcattccagcctgggcaacagcaagagtccatgacaaaaaaaaaaaaaaaaaaaaaaagatatcctgttacagaacaattattttttctcagcttacatttacataactgagagagccactgaagtgatcctctgcactaaggataccacattttctttttcatttctttacggtttttgagacaggatctcattctgtcacccaggctggagtgtagcgtcatgatcacagctcactgtagactcgactacctgggctcttgaatccgggaggcagaggttgcagttagccaagatcacgccattgcactcccccctgggcaacagagggagactccgtctcaaaaaataaaataaataaatgaataatgatagctggtggaagaactggatataaatgtacatcttactactgccctgcttcctgttccaagtctcataaaacagaacatactcattttaaaaattaaacagtaaatttcaaatcgagctgaaaattcagaattagtgttattgacacaccagaaaatttgaggatactctgaaaaaatacagggtgaataggaagaccatctaaaatgccaagaagttttataggaagcttaagatgattataacatttagctggaaaacaaaatgtgcaagaatagccaataatgatgttttccacttggaaaaaaattaaaattacaccatacataaaataatcccatatggattaagaaacaaaataatcataaaaaccaaaaaaaattgaccaggtacgatagctcattcctataatcccagcaccttggaaggctgaggcaggtaggttcgcttgagcccaggagtttgagccctgcctaggaagccaacatggcaaaaccccatttctacaaaaaatacaaaaattagccgggtgtggtggtgtgggaagccaacatggcaaaaccccatttctacaaaaaataaaaaaattagccgggtgtggtggtgtgggaagccaacatgacaaaaccccatttctacaaaaaatacaaaaattagccgggtgtggtggtgtgtgcctatagtcccagctacttgaggggctgaggcaggaggattgcttgagccgaagaggtcgaggccacagtgagccatgttcatgccactgcattccaacctgggtgacaaagcgggaccctgtctcaaaaaaaaaaaaaaaaaaaggaaatctatatctactgacacagaaaatttccaagatatggaataaggtaaaaggaaattgtgaaacagtaggttcagtttgatattgtttatataaagtaaaaccagaacacatttcaatatgaaaatataaagcataaaagtagccgtagaaaaagatctgaaaggaaaaacccagactgagaacagcgttaccttagggaaacctcaggaaaactgagttggaatgttagaagtgggacatgagagtctttaattttgtctatatcatttgaatgtcttacaatgataatggattcatacatcatttgtatgatttaaaaaaaaatgatttaaaataagaaaaagaagagaaaatcaaatttgtcaaaaaaaaaaaaaaaaaaccacacacacacacacagcctgacacttatgcaggaaaagacagtttggaggggaagcaaagcctcctgtggcctcagcagctgctcaggacagccatcctccatgtgacgattctatgatccacatagccacagtctgcggcaccaccatgtcaacatgggcttccaggacccctgcaaaaaggagagagagaggatggcttttcagagcttccactcggaagtgagacgcatcattgacaaccaaatcaactcagatgtccccacctaacttggggtggggaagagggcaggcctgcagtccctccatgtgctcaaaatactgctgaagagtgatggtgttcactacacacacctcatccacaagcaccacagacagacaaaacagaatcaaaatgtagacgaatagggattatactctaaaatgagcaattcctcaaaaaattaaaaataggattaccctgtgatctggcaattccacttctaggtatatagcccccaaaactgaaggcaggatctcgcctaccatcacacctgcctaattttttgtatttttagtagagacggggtttcaccgtgttagctgggatggtcttgatctcctgaccttgtgatccgcctgcctgggcctcccaaagtgctgggattacaggcgtgagccaccgcacctggcctccatgtcagcctcttaagtagctacgactacaggtgcacaccatcacatccagcgaattaaaaaaaaaaaatttttttttttttttttttttttagagacagagtcttgctatgttgcccaggctagtcttgaactcttggcctagagcgatccttccttccagctgggcctcccaaaatgctgggattacagatgtgagccaccacacccagcatgaataccttttttttttttttgagatggagtctcactctgtcacccaggctggagagcagtggcatgatctcagctcacggcaacctccgcctcctgggttcaagcaattctcctatctcagtcctctgagtagccaccacacctggctgatttttgtatttttagtagacacgggtttttaccatgttggccagagtgctctcctgacctcaggtgatccgcctgcctgccttggcctcccaaagtgctgggattacaggcatgagccactgcggccggcccgcgtgaataccatttttaacacatcgatttgaatcgtcctgttggtaattcatgtacttcccacatatgcttgagtttatttctagacttgtttcattgatctgtcagcttatttctatacatgtacacatttgttttaattagtgtagctttctattactatgcagtataatataacataaggcccctatgttaatcttgtttttcagaatttgcctgactcacatgtccatgcaataaactccagaaccattttattaagttttctacaaaaatccttttgggatttttttattgttattacattttatatagatagatgaattttgagaggattggcatttcttcaatattgactctcctactcatatttaataagacttcatcctagaatacaagaccattcacagcagttccaatctaccttttccttcggcgtttaactaccttccagccaaattcactatgatctggtctctgaacatattctgtgttcttttctgcatctctcttcacccaaactagtctctctttctgaaacatcctcctcctcttcttcccacagtttcctggccgggcacggtggctcatgcctgtaatcccagcactttgggaggccgaggcaggcagatcatgaggtcaggagatggagaccaccctggctaatatggtgaaatcccgtctctactaaaaatacaaaaaattagctgggcgtggtggtgcacgcctgtaatcccagctactcgggaggctgaggcaggagaatcacttgaacccaggaggcagaggttgcagtgagccgagatcatgccactgtgccactgtactccagcctgggaaacagagtgagactctgtctcaaaaaaaaaaaaaaaaaaaaaaaaaatatatatatatatatatcctcctcctcttcttcccagtttcctttttttttttttttttaatgagacagagtctcctctgtggcccaggctggaatgtagcagtgcaatctcaactcactgcaacctctgcctcccaggctcaagtgattctcctgcttcagcctcctgagtagctagctgggattacaggtgcccgcctccctgcccggcttttttttttttttaaagagatggggtttcaccatgttgaacaggctcaaattcctgacctgaagtgatctgcccaccttggacccccaaagtgctggaattacaggtgtgagccaccatgtccagcctccttcccacaatttctactgtcccacagcctacatatactttcatgtctcattacaaattgccacttaacccataaagccttcttcattcttccatccagatgtaacctctagctccgttgaagccccatagcatttgtttcgtcactttcttagggtactcactcaaatttgccctctgaatagttatttgcgtttcttttattggcccacaatcaacaacagttctgtattacagcaacaggtctcaactaggagttcacgtcagaatcttggaagacctttttaaaaaatccaaatgctagccaggcgcagtggctcacgcctgtaatcccagcactttgggaagcttaggcgggtgggtcacctgaggccaggagttcgagaccagcctgaccaaaatggagaaaaccccatctctactaaaaatacaaaattagcctggtgtggtggcacatgcctgtaatcccagctactggggaggctgaggcaggagactcgcttgaacccgggaggcggaggttgcggtgagccccgacatcgcgccactgcactctagcctgggcaacaaaagcaaaactccgccaaaaaaaaaaatccccacaggttgtctgtgaacctctggttgaaacactgttttatttatttatttatttatttatttatttatttatttatttatttttgaaacagtctcactctgtcgcccaggccagagtgcagtggcacgatctcggctcactgcaagctccgcctcccgggttcacactgttctcctgcctcagcctccccagtagctgggactgcaagtgctcgccactgcacccggctaattttttgtacttttagtagagacggggtttcaccgtagtgttgttctcctgacctcgtgatccgcccacctccgcctcccaaagtgctgggattacaggggtgagccaccgcgcccggcccgtgttttatttatctcttgagacagggtctggctccgttgtccaggttggagtgcagtggcgcaatcttggctcactgcaacctctgcctttctgcaacttcgacttccctgggctcaagccattctcccacctcaggctcccaggtagctgggactacaggcacccaccatcacaccctgctaatttttatatgttttgtagagacggggtttcaccatgttgcccaggctggtctcaaactcctggactcaagtgatccacccaccttggcgtcccaaagcggtgggattacaggcgtgagccaccgcgcccggacatcaagccacttctaatagctgcacagcattccactggaaagatgagccattacatattttaccaggcttctactagcaagcagctgtttttagtttctttctactataaacaatgctgggatacacatcttgtacctgcggatcctacaatttaaggggtcagcggaagtaagggaagcatcaggggaaaatgggattcaacttgtcccttacggaggagagtgtctgaagctgcttagagatgaccttggcctgacctccttgatggcagtgcttagagcagtagccctcaaatctcaatgtgaagatcacttggggagctaattaaacagcaggttcctaagtcgcactccagagaatcaggttcagtctggggcaaggtctgagaatacgcttttttttttttttttttttttttgagacagtcttactctgttgcccaggctggagtgcagtgctgtgatctctgctcactgcaagctctgcctcccgggttcaagcgattctcctgcctcaggctcccaagcagctgggactacaggcataagccaccatgcccagctaatttttgtatttttagtagagatggggtttcaccatattggccaggctggtctagaactcctgacctcgtgatctgcccacctcggcctcccaaagtgctaggattacaggtgtgagcccccgtgcccagctgggaatctgctttttttttttttttttttgaggcagagtttcactcttgttgcccaggctggagtgcaatggtgcaatcttggctcaccgcaaccgcaacctcccaggttcaagcgattttcctgccttggcctcccaagtggctgggattacaggcatatgccaccatacctggctaatttttctatttttagtagagatgaggtttcgccatgttggtcaggctgctctcaaactcccgacctcaggtgatctgcccacctcggcctcccaaagtgctaggattataggcgtgagccactgcgcccagccaagaatctgcaattttaacaacacgtcagctgattctaatgtaagtggctgtgtgccacacttggagaaacactgacttcaagagtagagggaagtaaacagtgttcacctgagaagcaggagaggctgtcgggggtcggataggacagacagttacttaggcatcttcaatcattcccagaggatcaggccgtagtgtgctttggggtggaacagaactatgaataacaaatccaccagctggcttccattctctaagaaagtccagggattctcagagtcacatagaaagaccccaagtcccctagtctctccctaatctggcaattcctcccctcccttgtcctccatgtcattcagttaggactataggactacaggactagaagtagctcagcatgttcactggagcattaaaaagtccactagtggctgggcgaagtggctcatgcctgtaatcccagcactttgggaggccaaggcgggcggatcacctgaggttggagttcaagaccagcctgaccaacatggagaaacaccgtttctcccacctcagcctcctgagtagctgggaccacacgtgcacaccagcacacctggctaatttttgtactttttttttttttttagacagagtttcctctgtcacccagactggagtgcagtggcatgatattggctcactgcaacctccgcctcccgggttcaagcaattctcctgcctcagcctcctgagtagctgggattacaggcacgcaccactgtgcctggttagtttttgtatttttagtagaggcggggtttcaccatgttggccaggctggtcttgaacttttgaccttgagtgatccaccgcctcgacctcccaaaattctgggattagaggcatcagccaccaagcccggcctttactttttgtcgagacagagtctcactttgttgcccaggctggtctcaaacttctgggctcaagcgatcctcccacctcagcctcccaaattgctgggattacaggcagaagcattatttaaacagcaaaaatctggaaaagaattccagttgttaaaatgagtggtaggttcacaagtctttgtcttattgtgcatacaaaatacatatgcatgactttattttttttttttagacggagtctcgctctgttgcccaggctgcagtgcagtggtgcgatctcggctcactgcaagctccgcctcctgggttcatgccattcttctgcctcagcctcccgagtagctgggattacaggcatgcgccaccatgcccagctaattttgtatttttagtaaagatggggttttgccatgttggtcaggctggtcttgaactcccgacctcaggtgacccgcccgcctcagcctcccaaagtgctgggattacaggtgtgagccaccgtgcctggcaacatgtattttttgactatgttaaatattttaaaattaaaaaataggccaggcgcggtggctcacacctgtaatcccagcactttgggaggccaaggcgggtggatcacgaggtcaggagatcgagaccatcctggccaacatggtgaaaccccatctctactaaaatacaaaaagctagctaggcgtggtggtgcatgcctgtagtcccagctacttgggaggctgaagcaagggaactgcttgaacccaggaggcggaggttgcagtgagccaagatcgtgcctctgcactccagcctggcgacagagggagactccgtctcaggaaaaaaaaaaaattaaaaattaaattaataaaataagagaaagacaaagttccttactcactactggaatctcttgaggttatttaccctctgtacctcatctctcctccatcaggcactagggaccagggagcaagatgtcaggcctcagctggatgcagtggctcatgcctgtaatcccaacactttgggaggccgacatggacagatcatgagatcaggagttcaggaccagcctggccaatattgtgaaacccccatctctactaaaaattcaaaagctaggtgggcatggtggcacaagcctgtagtcccagctacttgggaggctaaggcaggagaatctcttgaaccctggaggcggaggtttcagtgagccgagattgcgccactgcactccagcctggccaatagagggagactccgtctcaaaacaaaaaacaaaaaagacgttaggcctcaagaggccaatggaagcttgtaaaaatccacctccgcctcccccatgcagactgcaaccagcccctgtcctgctcctcccagtctgtgtctcacagcctgtatctgtcacgaagacttggcctcatttcccagccgagctgattgcatgtttggctaatatgacatttttctctgatgacaacaggactatgtgggacactgtattttggacaagcaagtcattccagcatctaccttctcctatcctactgcctccaaaccattcccactgtttctcttttgcatcctccagcctcacatctggctgtgtctctaggtttccttttgcatctctagtgatgagccttctttggctctttctcactgtttgtaagctcagcagccagcctagagctctcctgagtcttttttttttttttttttttttttgagacggagtcttgctctgtcgcccaggctacagtgcggtggcgtgatcctggctcactgcagtttctgcttactcgattcaagcaattctcctgcctcggcttccccagtagctgggattaaaagcatgtgccaccacgtctggctaattgtattttttagtagagacggggtttcgccatgttggccaggctggtctcagactcctgacctcaggtgatctgcccacctcggcctcccaaagtgctgggattacaggcatgagccaccgcgcccggccccaaagtgctaggatttaagatgtgagccactgggtccagctccatctagttttaatcacttgtcttaaaaatggaaaaactaatgctagagtgggaaggagacttggatggaccgaggatgcttagctcttccgtggcagattttggaccagaacccggatctcctgtgtctcctgagggatagaggtgagggaggaggacccacagccactagctcagccttgccccagctcctcccaaggcctcaacactcagccctttgaagatgctggctactaagcagctaatgagtctaccactctgggggtgggaagagcctgcctcacctgtcagccggtccattgcataacttgacaagttgaggccagggactctgcttcccacactaggcccagctgaagaggggaaaggtcagggtgcagggagtaacaaggaagctggacgctagtcctaccttcccctcagatcctaccccctctccctgcagggcttggggtgggttaaagttaagagaggcctatcggggaagcaggggtgggaaaacaggttctctgcaagagttcaacggggcagggctagtactctttctcacctctgaagggtcttttatttcagggagggaatttgcggacaagacagaaaagaggctgggtgcagtggctcacacttgtaatcccaacactttgggaggctgaggcaggagaatcacttgagccaaggagtttgagaccaaactgggcaacatagtgaggccctgtctataccattttaaaaattaaccaagcatggtggcgcatgcttgtagtcccagctatttgggaggctgaggcaggaggatggctttaggagttcgaggctgcagtgagctgtgatgtgcaccactgcactccagcctgagggacagagcaagaccttgtcttagaaacaacaacaacagcaacaaaacacgtaggccaggtgcagttgttcacccctgtaatcccagctactcaagaggctaaggcagggagaatctcttgaacccaggaggtggaggcagcagtgagctgagagctgagactgcgccactgcactccagcctgggtgacagagtgagaccttgtctccaaaaaaaagaaaaaaagaaaaataaaaaacatggaaaggaagaggaagcgccgggcgcagtgactcacgcctgtaatcccagcactttgggaggccatggcaggcggatcacttaaggtctggagttagagaccagcctggccaacatagcaaaatcccgtctctactaaaaatacaaaactcagccaggcgtggtggcaggcacctgtagtcccagctactcaggaggctgaggcaggagaatcgcttgagcccaggaggcggaggttgcagtgagctgagatcgcgccactgcactccagcctggacgacagagcgagactccatctcaaaaaaaaaaaaagaaaggaggaggaagcagcttttggctggtccttctttcaggccatgagttgtgagtttacgtataaaatggagaaataagagatgagacggagagccgactttgtcgttgaggctgcccatgcagcctctaatggaggcactggagagtggactcagtgcaaacatgtccggggtcccagtttggttccctgagctgtgaggcaacaaatgcagaggccagacacgcctttcccagggccatggactttctcaggtgtgccatgaagatggccatacttggccactgttcagcaattccatcacagcctctgagcaatccaatgagaggcttttgtttttgttttttttttggagactgagtcttgctctgtcaccctggctggagtgcagtggcatgatctcagctcactgcaactttccccctcctgggttcaagcaattcttgtgcctcagcctcctgagcagctgggatcacagtcacgcgccaccacacctggctaatttttgtattttagtagagacagggtttcaccatgttgtccatgttgaagtaaggagtctcaaactccttacttcaagtgttccacccgccttggcctcccagagtgctgggattacaggcgtgagccaccactcccagcctggttttgtttttttaaattatccaactgtttatcatctataagaccacatatatgtatataatatatagtatatatcatatatatgatatatatttagtatatatcatatatatatataaaatatatatcatatatatgatatatattttatatatatatcatatataaggccctcccacagaagcactcccaaaactgtacacaacccatggaaatacaggatccccaaaacccaaagtacttcctacgcaactgagtttgggggttgaagtttgtggcagctacagaggcctctctggtgactgaaggcctggttttagttacagacttctgtgcattgtagatatcaacagcacggaaaagtcaaacacacgtgttcgcatgctgaggtccagtttggacttgccgtgtacgcttcgctgtaacattaaatgaaaaaaaaaccctctttgtattatactcgcccagccagaaatttatattttagatacaaattagtgaatataaagatgtaattttttggctgggcgtggtagctcacgcctgtaatcccaacactttgggaggccaaagcaggtggatcacgaggtcaagagatcgagaccatcctggccaacatggtgaaaccccatctctactaaaaatagaaaaattagccgggtgtggtggcgggcgcctgtagtcgcagctactcaggaggctgaggcaggagaatcacttcaaccccggaggcccaggttgcagtgagccgagatcatgccactgcactccagcctggtgacagagcaagactccacctcaataataataacaaaaaagatgtaattgtttttcccatccatattcaaggaccccaggtcataagaaatcctggccacaagaaattcatctcttctcaatcccaaactcttccacaggactcacaaggcctccagagacaagtagcccaagatctttgacctgcttgaaggaagagcgggagagggtgggggcgcagttctcacccagcgtcagcccttgatgtgtctctgggcttgctctggcaggccccagtccaagggcaaaatggaggacatttggctttgattggaaaagatttcagaattctgtggtttgatgctctctgaccatgagtggataggtgggagccactgatggttaatatctcaatataatattttcccatttacctttatggcgttacacacaatcctaacatgcctagtcatctcccctcccctctcctccccttccctttttgagatggagtctggtcctgttgcccacaccagaatgcagtggcatgatcatagttcactgcagccttgaactccggtgtcacaaataatctttttttttctttttttgagatggcgtctccctctgtcgcccaggctggagtgcagtggcgtgatctcggctcactgcaacctccacctcccaggttcaagcaattctcctatctcaccctcttgagtagctgggattacaggcatacaccaccacacctggctaatttttccatttttagtagagacgggttttcaccatgttggtcaggctggtctcaaactcctgacatcatgatccgcccacctcggcctcccaaagtgctgggattacaggcgtgagccaccacacccggccctatctcttttcttaactcacaggaaaatagaagcagcagattagaaaagtctgatcagcagctgctaaaaaaacacataataccgaggctgggtgtggtggctcacacctgtaatcccagcactttaggaacctgaggtgggaggattgcatgaggcctaggagttgaagaccagcgtgggcaatatagcgagacccctgtctccacaaaaaaattaagaaaaaaaaacaaacaaaaaactagctgactgtggtggcatgcacctgtcattctaggtacttgagaagctaaggtgggaggattgattgatcccagaagttcgaggctgcagtgagctatcattgtgccattgcactccagcctggccaagagagcaagaccccgcctctaaaaaaaacaataaaaatggccgggcacagtggctcacgcctgtaatcccagcactttgggaggccaaggtgggcagatcacaaggtcaggagatcaagaccatcctggctaacatggtgaaatcccatctactaaaaatacaaaaaaaaattagccaggcacggtggtgggtgcctgtagtcccagctacttgggaggctgaggcaggagaatggcgtgaacctgggaggtggagcttgcagtgagcggagatcgcaccactgcactccagcctaggcgacagagcaagactccgtaagaagaataataataataataataaataaataaataaataaaaatggcctggcgcagtggcttacgcctgtaatcccagcactttgggaggccgaggcgggcaaatcacctgagtgatcaggagttccagaccagcctggccaacatggagaaaccccatccctactaaaagtacaaaaattagccaggcgtggtggtgggcgcctgtaatcccagctgctcaggaggctgaggcaggagaatcacttgaacccggggggtggaggttgcagtgagccaagatcacaccactgcactccagcctgggagataagagcgacactgtttaaaaacaaacaaacaacaaaaataaaaataaaaataaataacacataatgcctaaggtaattgaaaacaccctgaaacatacagaagatttttgtttttgttttgtttgagacatatcactctgtcatgcaggctggagcgcagtggcatgatctcagctcaccgaaacctccgcttcctgggttcaagcgattctcctgcctcagcctcccaagtagctggtattgcaggcatgcaccacaacaccaggctaattctttttgtatttttagtagagatggggtttcaccatgttggccaggctggtctcgaactcctgacctcaaatgatctacctgccttggcctcccaaagtgctgggattacaggcgtgagccaccatgtccggctgaagagattatatatattttaatgccagatgagaattcaaaaatcacagaaaattggaaaagcctgggcaacatgcttaaaaccccatctttaccaaaaaaaaatatatatatagatatagatatagatattaaaaaattagctgggcatggtggtatgagcctgtagttccagctactggggaggctgaagtgggaggattactgaccctgggagatcaagggtgatgagtcatgatcctgtccctgcactccagcactcagggtcaacagagcaggactgtctcaaaaaaaaaaaaaaaaaaaaaaaaaaaaaggaaagatttagttggtataggagcagataattatatgcattttaatttcccgaaatgcttctctgacattacaataactgatatttatcactataaccctatattctgaagaaaaacccagagaacatagatttgttaacctatacctaagaaagagatgcatagaatatatttagcagtttccaagcaagatggtaaaaataaaaagttttggtgcttagagaggtaaatctataggttctggatagctgaagttttgaaattaatatcacactccagaccccatctgcccttaatcctggggttcttacaggataccttgtttttgaggagtctcgctctgtctcccaggcgggagtacagtagcacaacctcggctcacatattggccaaggtggtctcaatctcctaacctcaggtgatctgcctgccttagcctcccaaagtgctggaattagaggcatgaaccactgcgcctggctttcttacaggatacttttaagtttcctatgctcccctgggaggaaaaggaggtggtggagatcatagtgtgtccggaactggtgggttcttggtctcactgacttcaagaatgaagccgtgaagcctcgtggtgagtgttacagttcttaaaggcggcgtgtctggagttttttccttctgatgttcagatttgttcagagtttcttccttctggtgggttcgtggtctgacgctggctcaggagtgaagctacagaccttcacggcgagtgttaataggtcttaagagggcacatgtagagttgttccctcctctcagtgggtttgtggtcttgctatcttcaggagcgaagctgcagacctttgtgatgagtgttacagctcataagagcagtgtggacccaaagtctcagcagcagcaagatttactgcaaagagcaaaagaacaaagtttccacaacgtgaagggatacccaatcagattgctgctgctgctagctcaagcagcctgcttttattctcttatctgaccccacccacatactgctcattggtccattttatagagagccgattggtttgttttacagagagctgattggtccgttttgacagggtgctgattggtgcatttacaatccctgagctagacgcaaaagttctccaagtccccactagattagctagatacagagtgctgactggtgtatttacaaaccctgagcaagacacagagtgctgattggtgcatttacaaaccttgagctagacacagagtgctgattgatgcattcacaatcccttagctagacataaagattctccaagtccccaccagattagctagatacagagtgctgattggtgcatccacaaaccctgagctagacacagggtgctgattggtgtgttcacaaaccttgagctagacacagagtgttgattggtgcactcacaatcccttagctaaacacaaagcctctccaagtacccactagactcaggagcccagctggcctctccccctggattgctcactggggccgcaggtggagctgcctgccagtcccgcgccctgcgcccacactcctcagcccttgggcggtcgatgggattgggcgctgtggagcagggagcggcactcctcagggaggctcaagccgcgcaggagcccagcgtggggggtgggttggagatgcaggcatggcggactgcaggtcccgagccctgccccgcagggaggcagctaaggcccggcgagaaaccgaccacagcagctgctggcccaggtgctaagcccctcactgcccgggctggcggggcaggccagccggctgctcagagtgccgggcccgcccagcccacgcccacccggaactcatgctggcctgcaagcgccgcgtgcagcccgggttcccgcccgcgcctttccctccacacctccctgcaagctgagggagctggctccggccttggccagcccagagtagggctcccacggtgcagcggcgggctgaagggctcaagcgcggccagaatgggcaccgaggccgaggaggcacccagagcaagctagggctgccagcacgctgtcacctctcaataggacccctggaggaggacccacttcagttcacatgggaacatccattgcagattacagaccacggagaatggagcccaggcagctttcactcatccactgatgatcagccagtaccgaaccacacaatgtttttttttttgagacggagtctcactatgttgcccaggctggtcttgaacttctgggctcaagcgatcttcccaccttggtctcccaaagtgctgggattacaggcatgagccactgcacccggccataccaaaccacagaattgtgaagcctttttcaaagtgaaatatcttcaactttgctcttgccccaggagtcccctgtaagcagccaagagtgaaacttttgagtttaggtggtccaacatctgccttatacagatgagaaaattgaggcccaggtatgaagttagtataaaagtagcattctttcttccttaagtattttggtagaattcaatgataaagccatctgggcctggaattactttgtgggaatggatttaatttcattaatatttctttcttgggacattctttaccattcatcttttcttcttgtgataattttctttttgccagcttgtgcctgtttctacaatatgtagaaattcctgaaataaagtggtttgtaatgtcatataaaaatatttaaggaactggctgggcgtggtggtggggcctgtaatcccaacactttgggaggctgaggcgggtgaattacttgaggccaggagcttgacaccagcctggtcaacatggcgaaaccccgtctctactaaaaaaaaaaacaaaaaaaaccccacaaaaactagccaggcgtggtggcgcctgcctgtaatcccagctactcaggacgctgaggcacgagaattgctcgagcctgagagttggaggttgaagtgagctgagattgtaccacttcactccagcctgggcgacagatagagactccatctcaaaacaaacaaacaaactgccctgctacttttaaccgcttacattcccaccaagagtacacgagagttccaatgtttccacattctctccaacacttaattttctgtgtgtgtttttttttttttttcctgtagtggccatcctaatgggaatgaggttttgatttacatttccttaacgattagtgatgttgagcatcttttcatgtgtttcttggccatttgtataccttcatttgtctccctctgtcgcccaggctggagtgcagtggcgtgatcttggctcactgcaagttccgcctcccgggttcatgccattctcctgcctcagcctccggagttgggactacaggctcccaccaccacgcccggctaattttttgtatttttagtagagatggggttttaccgtgttagccaggatggtctcgatctcctgaccccgcgatccgcccgcctcggcctcccaaagcgctgggattacaggcgtgagccaccgcacccggccttgccgatttttaaattattattattaatatttctgtttttgagtgaatgatgtgcctttctgcatccttatatttaaggtgtatattataagaagcggtggctcactgcactccagcctgggcgacagagcgagactctgtctcaaaaaaaagaaaaggatttgtggatatatctgaaaacaactgcatctcgtattttgaaaagagtaattgccaaccccctggcatagctggttaagaaaaagacaaaaggtttttttttttgtttgttttttttttttgagacggagtctcattctgtcactcaggctagagtgcagtggcacaatctctgctcactgcaacctctgcctcctgggttcaagcaattctcctgcctcagcttcccaaatagttgggattacaggtgtgtaccaccacacctggctaacttttgtatttttttagtagagacggggtttcactatgttggccaggctggtctcaaactcctgatctcaagcgatccacccacctcagcctcccaaattgctgggattacaggcgtaagccaccgtgcccggccaagagaaagaaaaaaggtttaaataacctttatcatgaatgaaaagaggtactaaataaatatcagctgcacttaaaaatttttttccagccaggcatgctcacgcctgtaatcccagcactctgggaggccgaggtgggcagatcacttgagctcaggagttcgagaccaggctggacaacatggtgaaacccctatctctattttttttaatcaaagaaaaaattcctatatatttacaactgacagtaagagagtttttaatgttttgaccaaaatatttaaaggtcacagagcaatcatacattttctcattgattattaagattgctttgcggccgggcgtggtggcttatgcctgtaatctcagcactttgggaggccgaggcaggcggtcaggagatggagaccatcctggctaacacggtgaaaccccgtctctactaaaaatacaaaaaattagccgggcgtgggggcggcaacctgtagtcccactaatcaggaggcagaggcaggagaatcgcttgaacctgggaggtggaggttaaagtgagccgagatggcgccactgcattccagcctgggtgacagagtgggactccgtctcaaaaaacaaaaacaaaaacaaaaaaaaaggccgggcgtggtgtaatcgtagcactttgagaggctgaggtagatggatcacaaggtcaggagttcaagatcagcctggccaatatagtgaaaccccatctctactaaaaatacaaaaattaactgggcgtggtagcgcactcctgtaatcccagctacttggaaggctgaggcagaagaatcacttgaacccaggaggcagaggttgcagtgagccgagattgtgccactgcactccagcatgggcaacagagcgagactctgtatccaaaaaaaaaaaaaaaaaaaaaaaaagattgctctgcatggtttcagcttgcacggtcctatctgtggtcctgcatggccatgcaaagtgaaggctgctggttaagcagtttctacaccgttgttgtcttcatatctgatgctggagtttgaggtccccggggcaggcagttggtaaagtggagaatgagctggaactcactagcataaactggagcccatgagggcaggctggagaccgcgtcagttcttgttgcttctaatgttggtggtgtgggcatccaggagaaaccagggctctttgcccagagatataaacactgacacctggtccaggagtaagagaagctgaaggaagattcaggagaaggtgaagcaattacaggtgtagctgctgcctcttgccaatgagttgaggcatcagataaccagcactgtcagctgcggaacggctgctgcttcaattcagccctccagtctctcacaggactctcttgtgtagttttcaattgggttcaggggcgaaaaaaaaaaaaaagaatcatttgtggcccatgctaactggaaatgaacaggaaagggaactctgggaaaggggattctgggaaagggaattcagccaccatagttaccgtatagtttaatggctgtgcatggagggctcgaagtcagacttctcagatttgatttgtttcctttatttcaagtcgtatgtccaagggtaagtttcttagtctttctgggcctcagtttgcttgtctgtaaaatgaagatgtaatagtagcatttaagattagtttgaggttttttaaaattatttttatttccttttaattttttgttttgtttttgtttttgttgtttttgagacggagtttcactcttgttgcccaggctggagtgcaggggctcaatcttggctcaccgcaacttctgcctcgcgggttcaagtgattctcctgcctcagcctcctgagtagctgggattacaggcacacgccaccacgcctgactaattttgtatttttagtagagatggggtttgtccatgttggtcaggctggtctttaactgctgacctcaggtgatccgcccgcctcggcctcccaaattgctgggattataggcgtgagccaccacgaccggccccttttaaatttgtatttatataaaaacttctatgctagtttgaggtttaaatgagataatacatataaattgttaacatattattggtgtattatcaataagacttgccttattggaaatgtttaataaacatcagccatgtcggccaggcgcagtgactcacacctgtaatgccagtactttgggaggctgaggcaggaggattgcttgagtccaggagtttgggaccagcctgggcaacatagggagaccctgcttctacaaaaaaaaaatttaaattagcaggacgtggtggtgcacacctgtagtcccagctactcaggaggctgaggcaagaggatcacttgagtccaggaggttgaggctgcagtgatccaagattgtgccgctatgctccagtctgggcaactgaatgagaccctgtctcaaaacaaaacaacaaacaaaaacaatcaaatagacaaaaatatatcagccatgattattagtaattgtgtgatctttctggtcctcagtttttttcagctgtaaggtggggataacttccttggcctacttcacaggcatatattgagaatcaaatgaaataaataattcaaataaaataggaataattatatgaataacatatcaccacttcatggtagaggtggtggtaaaaatgatgataaacatagttcttagttccttccagcctccatattggtatctactccagtgactaaagccagctattccatgattattaatcagaaaagcagttatccaaatgtaagatgttaatagggaaactgagtgcagaggatatggaactttttgtacttaccatctttgccatttttctgtaaatataaaactgtttactaaaaaaataagtttactgaaaaaacttgataaaaaaaaaagaatgtcattgtcaaactttagcagaattctctggaaggcttattaaatattaaatacacattgctgggtcctagccccagagttgctgattcagtgggtctgggctggagccagagaacttgcatttctttttttgagatggagtcttggtctgttgcccaggctggaatgcagtggtgcgatctcggctcactgcaacctccgccccctgggttcaagcgattcttctgcctcagcctcctgagtacctgggattacaggcatgtgccaccacacccggctaattttatatttttagtagagatggggtttctccatgttggccaggcttgtctcaatctcctgacctcgtgatccacctgcgtcggcctcccaaagtgctgggattacaggcatgagccactgtgccctgccgagaagttgcatttctaacaagcagtgctgaggctgctgatctgaggatgacactttgagaactcctgacttaaaatgtaaagtagtacgtgggtttcctgtctttcctatgaacaaaggctcctattcatcacggtctgccatttcttggttcgtgctgtccatgacatcacccaacatttacctacgaagcaagaggaaggagacaactgatgactgactgagcaggatgatactaaacggggcctgcataatcccttttaccctgcttttctccagcttcttcgaagctttaggccatggatccaaaccatgcttaaaataacacacaagtacatatttaaatatgtatatgttaaatatataatacatatatattttatgcatacatttcattacaggttgagcatcccaaatcccaaaatctgaaacccgaaatgtttcaaaatccaaaacttttgagcaccaacatgacactcaaggaaaatgctcactgcagcatttcagattttgaatttttggatttgggatgttcaacacataaatataatgcaaatattccaaaatctggaaaaaaatctgaaatctgaaacacttctggttgcaaacattgcagataagggatactcagcctgcaaaaagaaatacatgggctgggcatggtggctcatgcctgtaatcccagcactttgggaggctgaggcaggaggatcatttaaggccaggagttcaagatcagcctgcacaacatggcaagaccctgtctctacaaaaaaattaaaaaacaagccgagtatggtggtgtgtgcctatagtcccagctactcaggaggctgaggtgggaggatcgcttgagcccacgttgtcaaggctgcagtgagccatgatcgtgccattgcactacagcctgggcgacagatctcaggctgtctcaaaaataaatacgtgtgtacatacgtgcatacatgcacacatgcatgcacgcatacacgcatgcatgcatacatacatgcatgcacacgtacatgcatgcacacatgcatacacacgtacatgcatacacacatacatgcatacacacctacatgttcatagaggaaaaaaattacccacagcttcccaaagacaaccacttaacattttggtctagtcccaaattttatttcaactatgttttgagggttttcttttaaacattgcttttgcttcttttgttttgctttgtggtttcttttttcttttttttgagacagagctggctctgttgccaagctggagtgcagtggcatgatctaggctcactacaaccttcgctttcagggttcaaaacatttccctggctctgcctcctgagtagctgggactacaggcacgtgccactacacctggctaatttttgtatttatagtagagaaggagtttcacgatgtgggccaggatggtctctatctctttacctcgtgatctgcccacctcggcctcccaaagtgttggggttacagcgtgagccaccgcacctggtctgttgttgttttttttttttcgagacggagtcttgctctgtcccccaggctggagtgcagtggcgcagtctctgctcactgcaagctctgcctcccgggttcatgccattctcctgcctcagcctcctgagtagctgggactacaggtgcccgccaccacgcctggctaattttttgtatttttagtagagacggggtttcaccgtgttaaccaggatggtctcaatctcctgacctcgtgatccgcccgcctcggcctcccaaagtgctgggattacaggcgtgatactgggattacaccacgcccggccctgttttgttttaatagaaacaaggtctcgttctgtcactgaggctgaagtatagtggtgtcatcatagctcactgcagccttgaactcctgggctcaagtggttctcccatcttaacctcctgagtagctgggactacaggtgtgtgccaccatgcccagctgttttttttttctttttttgtagagacggggtcttgctctgttacctaggttggtctcaaacttcttggctcaagtgatcctcccaccttggtctcctaaagtgttgggattacaggcacgagccaccatgcccagcctcttctaaacattgtcataatttaggccgtgtgcagtctcatgcctgtaatcccagcactttgggaggcccaagcaggcagatcacttgaggtcaggagttcaagaacagcctggccaacatgcggaaacccagtctctactaaaaatacaaacattagccgggcatggtggtgggcgcctataatcctagctactcaggaggcagaggcaggagaatcgcttgaacctgggaggcagaggttacagtgagccgagatcgtgccactgcactctagtctggaagacagagaaagactccatctcaaaaaaaaaaagacaaacattgttgtaatttataagggcacacacgtcctgctttttcacataacactgtatcataaagatttctatgttagtgtgtagtatttgtaaatattaaatacttgcataggccgggcacaatggctcatgcctgtaatcccagcactttgggaggttgagacaggcagatcacttgagcccaggaggttgagaccaacctgggcagcatagcaaaaccctgtctctacaaaacatacaaaaattagctaggcgtggtggcacatgcctgtagtcccagctactcaggaggctgaggcaggagaatcgcttcagcctgggaagcctcagggctgcagtcatctgagatggtgccgctgcagtccagcctgagcgacagagtgagacctcgtctcaaagaaaacaacaacaacaaaaaaccttgcttaatactgcagggttattgttggatccccgcttttccatttgttcactgtcatcaaaggagactcaaatttcacagttgcatggactttatttttctataactgaactaaatgtctttcttaagccccaggtctctggaagcaaagaacataatcaagtcacttccaagtaaactcagtgtttgtgtgtgtgtgtgtgtgtgtgtgtgtgtgtgtgtgtgtatatatatatatttttttttttttttttttttttgagatggagtctcgctctgtcacccaggctggagtgcagtggtgcgatgtcggctcactgcaagctccgcctcctgggttcatgccattctcgtgcctcagcctcccgagtagctgggactacaggcacctcagcctcccaaagtgctgggattacaggtgtgagccaccgtgctcggcccaggtaaactgtcttaatcagattctgctgttctcaagtcctcaccactctgttgctgagggagttatgtaaatgtcaccaaagagccaatggggaggcttcttgatctttgtcagcctcgttccatggtggtctcctgttccaggtataccaggtgagccatccctgtctgtctcaggctggggtagaagaaggtaggaaggcagcattgagggaatgtgtgagtgggaggcaggaaggatctgccttgagtgtggataacctgctgtgtagccacatcctcatccatccatgtggcattctcttatcacagccatgagatcgcccctctctaaagaagtagaatgtagaagctggaagaacctgtttctttttgtttttgttttgagacagagtcttgctctgtcgcccaggctggagtgccatgacatgatcttggctcactgcaacctctgcctcctgggttcaagtgatcctcctgcctcagcctccccagtagctgggattacaggcacctgccaccatgcccaactaatttttgtattttttagtagagacggggtttcaccatgttggccaggctggtctcgaactcctgatctcgtgatccacctgcctcggtctcccaaagtgctggaattacaggcgtgagccactgtgcccggccaagaatctgtttctaatctcaagcctagacatgccaagctaccatttctattccacagtgtccatgccatcatggtaggagatctgcctctggggcttactgccctcctggggcttccccaggaatcaagatcttttcaatccacttaaaagaggtttattgaacttcagatggggctgggtgcgcagttcctgttctttcgcttcctcttccaatgccccacctgtcttccctctctaatgaaaccttatctggagcggaggtgcggagaattgtttctcctcttcctgagtcttttggtctcactcttgaatgcacagcttgtgagtttaaaaaccaagatgttgttgactttttttatctggttctatcctaggagggatggtggccttggattaaaagggattttgagaaagggaaagaagaaactcgttatcatcttaaattattatcctgcctcataaataatgcagcaaaattatctgggcacatgtcaccagtgacctttggcagacagggtggagcagagagctgtgtatgagccaagacctgatgtcattgaggaaggtaaagtgaggctggggaggctgatggtaaagacagcagcataggcaggtggttccccctgtgaaaaaggagaagggtgcagactgtgggtgtctgaacaacggtggtttgtgccgtccgcagagctgcaagtcatcacccgcccctcctccctcagtaagaaagttggagcacagactcagacaattaagggcgccctttccaatccacccggacacagtgatgattgtccaaagcaattggcttgctcagacagccagaaaaaaatctagtctatcggcataaactgtttgttttttttgttttgttttgttttttgagatggagtttcacccttgttgcccaggctggagtgcagtggcgccatcttggctcactacaacctctgcctcctgggttcaagtgattctcctgcctcagcctccccaagtaggtgggattacagtcgtgagccaccacgcccggctaattttgtacttttttttagtagagacggggtctcaccatgttggtcaggctggtctcgaactactgacctcaagcaatccacctgccttagcctcccaaagtgctgggattacaggtttgagccaccacgcctgtatgaactctttatgtgtatataatcatatacaaagtgattacaatttgcagtgagcctcagcataaactctttttgtgcatgtaatccggatattttctttaaaatttttcccatgagtagaattgctgagccaaaggataaaacttatgcaattatgatgttaaaaaagaaaggtcggtggttcacgcctataatcccagcactttgggaggctgaggcaggcggatcacgaggtcaggagatagagaccatcctggctaacatggtgaaaccccgtctctactaaaaatacaaaaaaaaaaaaaaattagccgggcgtggtggcgggcgcctgtagtcccagctcttccggaggctgaggaggagctctgtcccctaggggctgaagtgcagtggtgccatcatagcttactgcaacctggaactcctgagcacaggtgatcctcccacctgagcctcctgagtaactggggctataggcagaggccgccaagctgagctaatttttaaactttttgtaaatacaggatctcaagatgtgggccaggcttgtctcaaactgctgacctcaagtgattctcccacttcagcctcccaaaatgctgggattacaggcaggagccacagcgcccagccagccatggtcttaatacaaaaagtaccaaagctgttaacttaaagggggatgaggcatgagtcatggtggtggaaaataaattggtacaatctttctgtaggaaaagtggtcagtatgtcaatatgcataaaaaaaatttaacctagcacctctacttttaggaattcatctgaaggcaataattggacagatgtgcaaagatatatatatatgccaggaagtttaaagaagcatgtttataatagttgaaaatagacatgatttaaatatctagcaacagaagattgttaaaaatagtacttccggccaggcacagtggctcacacctgtaatcccagcactttgggaggccaaggcaggcagatcacctgaggttgagagtttgagaccagcctgaccaacatggagaaacctcgtgtctactaaaattacaaaataagccaggcatggtggtgcatacctgtaatcccagctactcaggaggctgaagaaagagattcgcttgaacccgggaggcagaggttgctgtgagccgagatcgtgccattgcactccagcccgggcaataagagcaaaactcctactatatatacatatatgtgtatacacacacacacacatatacatatatatgtatagtacattcacataatcaaatatcttacagtcattaaaaattatgacaaggccgggcgtggtggctcacagctgtaatcccagcactttgggaggctgaggcgggcagatcatgaggtcaggagttcgagaccagcctggccaatatggtgaaaccccgtctctactaaaaatacaaaaattagctgggagtggtggtatgtgcctgttgtcctagctactcaggaggctgaggcaggaaaatcacttgaacccagcagacggaggttgcggtgagctgagatcttgccactgcactccagtctgggcgacagagcaagactctgtctaaaaacaaaacaaaacaaaacaaaacaaaaaaccactttgaagaaataaaaagataaaaagcaaaacaaataacaaattgtatgtacttattgtgtacaacatgatgtgacattctgtacattttaatctttttttgtttatttatttattttgagacgaagctctatcgcccagactgagtgcagtggcacgatctcatctcactgcaacctccaccttctgggttcaagagattctcctgcctcagcctccagagtagctgggattacaggtgcatgtcaccgtgtctggctaatttttttgtatttttagaagagatgggggtttcatcatgttggccaggctggtcttgaattctccacctcaggtgatccgcccacctcggcctcccaaagtgctgggatgacaggcgtgagccaccgcgcccaaccacattttaatctatttttcacttaaggatcttcctgggccaaactagatttcttggaagccatgctttgtttcatttcgtaagttcaagcctttttcttccttttgggtaactccagaattcctcactctcctcccccactcattgcctctgcttcttcccacatgcccctcttctcttcccatcaggcttccctagtcaacattcttttcagaagtgaggcttgccctcgtgacacctctcttaagtggctcagcctggaaaatcctctaggagagttgcccttgacgacagacagactcagaggtcacaggccctgtgggctgtggggcctggtgtggatgagggtgtcagccaaagtggcacttctggggcaactaacaatagattacacaaagtccactgccaagtagtcgcttgggctgggccggtaaaaggccctgatcagccgctgggaaaggctggtcttcaacccttggactctaaccgcggcaggactcagcagaattcaaggtcctgatcatgagaatggctttgggtctcacatgtgccagttcctgccctgaagccttaagtttgagagcaagaaggaaacaaatggacaggaagactcccatgaatacaggaagcgcccaaagatctcaggagcaagccccttctttaactgagagcattcactttcccttctgatttactcccccagaaaaacattagagctgacaccttcttggtgactttggatcatgagctcaaacacgatctcagagctttgccattagagatcatctgtcctggccggcgcggtggcttacgcctataatcccaggactttgagaggccaaggcgggtggattacttgaggcgaggagtttgagaccagcctggccaacttggtgaaaccccatctcgaactaaaaatacaaaaattaggccgggcgcagtggctcacatctgtaatcccagcactttgggagtctgaggcaggcagatcacaaggtcaggagtttgagaccagcctggccaacacggtgaaacctcgtctctactaaaaatacaaaaattaactgggcgtggtcgtgggcgcctgtaatcccagctacttgggaggctgaggcaggagaatcatttgaacctggaggtgtaggttgcacttagccgaaatcatgccattgcactccagcctgggcaacagggcgagactccgtctcaaaaataaaataaaataggctgggcatggtggctcacttctgtaatcccagcactttgggaggctgaggcaggcggatcacgagatcaggagatcaagaccatcctggctaacacggtgaaacctgtctctactaaaaatacaaaaacaaaattagctgggcgtggtggcgggcgcctgtagtcccagctactcgggaggctgaggcgggagaagggcatgaacccgggaggtggagcttgcaatgagccgagatagcgccactgcactccagcctgggcgacagagcgagactccgtctcagaaaaaaaaaaaaaaaaaaaaattagccacatgcagcggtgtacacgtgtggtcgcaggtattcaggaggctgaggcaggaggatgacttgagcccaggagttcaagggtacggtgagctatggtcacaccactgcactccaccctgggtgacagaatgagacactgtctccaaaaaataaaaataaaatcaggactgtcttctttgtagacagtttgaaattctgaaagagaccgggcgcagtagctcacgcctgtaatcccagcactttcgaaggccaaggcgggcggatcacctgaggtctggagttcaagacagcctggctaacatggtgaaaccccgtttctactaaaaatacaaaaaattagccaggcatggtggcgcacacctataatcccagctactggagaggctgaggcaggagaatcgcttgaacccgggaggcggaggttgcagagagccgagattgcaccactgcactccagcttgggcaataagagtgaaactccgtctcaaaaaaaaaagaaattctgaaagatagctgttgaataattggctcatctggattactgagactggacaattgccaaatcttagagcagaaaatgacagtgaatcatagtattctgcccctggcttctaggttggtaaatatcccagcagtccgagataaacggctatccctgcccttcttggctgtctccagggatatgctatcatgtcccttcacatattctttgaggaattacacaccaagcgagaataggagatggcgtatactagttttaagggaggagaccacccctcatattgtcttatgcccaatttctgcctccaaagaaagaaaaagtaaaaactaaaaggcagaaatgaaatccacaggcagacagcccggcgccacaccctgggcctggttgaaaagcgacccctgacctaatcggttatgttatctatagattacaggcgttatatagaaaagcaccgtgaaaatccctgtcctgttctgttccgttctgattaccggtgcatgcagaccccagtcacgtaccccctgcttgctcaatctatcacgaccgtctcacgcagacccccttagagttttgagcccttaaaagggacaggaattgctcactcggggagctcagttgttggagacgtgagtcttttttttttttttttttaattgaacattgttgggtgtttctcgcagaaggggatttggcagggtcacaggacaatagtggagggacggtcagcagataaacaagtgaaccagagacgtgagtctttagaagctcccggccgaataaagcccttccttctttaacttggtgtctgaggggttttgtctgcagcttgtcctgctacagtttatttatttatttttgagacagagtcttgctccgttgctcaggctggagtgcagtggcgcagtctcagctcactgcaacctccacgtcccaggttcaagcgattcttgtgtctcaccctcttgagtagctgagattacaggcatgtgccaccacgcccagctaatttttttttttttttttttgagacggagtttcactctgttgcccaggctggagtgcagtggtgtgatctctgcaccctggaacctccttctcctgggttcaagtgattctcctgcctcagcctcctgagtagctgggattataggcacctgccaccatgcccagctaatttttgtattttagtaaagacggggtttcaccatgttggtcaggctggtcttgaactcctgacctcaggtgatccacctgccttggcctcccaaagtgctgggattacaggcaggagatggagtatactagttacccagggtaggtacctgtgcactcccctggaactggggcatggtgtcagctgcacccaaccatatgcattgcaagtaggagagaggtggctcctcaaaggaaaaccttttattattagaagaaaggactatagaaagtaggaaggacaaaaatagctctgcgcataacagagaccgtgagatttcctagaggtgaccagcctctgctggatggcgtagggtgagcctcggcagctcttccagcgggcctttctgtgctgtggaggctggaaggagaaagctgcccttcccagattgcatgcagcttggattctgggcgcagcctgggttctaggttgatacttattaataaatgcattccttcgagatctgaaaagtggaagtgggctgggtgaggtggctcacgccggtaatcccagcactttggaaggccgaggctggtggatcacctgaggtcaggagttcaagaccagccaggccaacatggtgaaactccacctctactaaaaatacaaaaattagctgggtgtggtggtgggcacctgtaatcccagctactcgggaggctgaggcaggagaatcacttaaacccagaaggcggaggttgcggtgagccgagatcgcaccactgcactccagcctggacaacaggagtgaaactctgtctcaggaaaaaaaagagaaaagaagagaagaagaagggaggggaggaaagagactagaagagacgagatgaagggaagggaggggaagggaggggaagggaaggaggtcgtgctgtgttctttttgctctcagctgtttgcttttggcaagaaggccatgagatgcccatgtcaagtctccaggtttgaggatattgagagaaactgtggaggtagcagtggcagaattccacattctagtgtataggtgggggcggtgggtggcagcaacctcttgggcccagcttcctggtacctggattgtcgctagaacagaatgtcctacaactcagcgttcctgtgggtgacagataatgactccattgggagtgttctgggagtcattcctgaaagcaaaccttgagtctgctcctctcgcccttccagggacttggtaatctttcagttgcatagattatgtgtgcctagaacaggcacagtggctaatgcctgtaatcccaacactttggggggccgaggtgggagcatcgctttagcctaggagttggagaccagcctgggcagcacagtgagaccccatttccacacacaacattttttttttaattagctgagagtggtggcacacacctgtagtctcagctgcttaggaggctgaggtgggaagatcgcttgagcccaggaggccaaggctccagtgagctgtgatggcaccactgcattccagcctgggtgacagagcaagaccctgtctctacaaaggaaaaaaaaattcctaagatttttcaaggagctagctcattgttgaatgcttggaggttctcagtctttactctgtcactcctattctactttcccaccatgctgtttctcactgtgccacctcattccttcattcctcccaaacactctaccatttctctcaaaccacgtgtgcagcagactttattgaagtgtgtttttttttttttttttttgaggcggagtctcgctctgtcaccaggctggggtgcaatggcacgatcttggctcacagcaacctccacctccccggttgaagcgattctcctgcctcagcctcctgagtagctgggactacaggagcatgtcaccacacccagcaaatttttgtatttttagtacagatggggtttcaccatgttggccaggctggtctcgatctcctgacctcaagtgatctgcccgccttggcctcccaatatgctgggattacagtcatgagccaccgcccctggcctttactgaagatttgaggtagagaaccacaacacactacagtgtgcaatacggctcaaaattgaacattggacatcactgtccaaaataaccacctgccattctcttgcctgaagatatgtctcatttagttagttatttgcaacagagtcttgctctgccacccagattcgagtgcccaggtgttgctcactcactgcagcctcgtcctcctgggtaaaaatggggtttcaccatgttgcctaggctggtctcgaactcttgggctcaatcgaacctcccacttcgcctcccaaagtgctgggattgtaggcgtgagccacggtgccaggcctatttattttttcacatgcctgctgtgtcaaatgaagatatttccacctcaagggcggatcacttaaggtcaggagttcgagaccagcctggccaacatggtgaaaccccgtctctactaaaaataaaaaaaatcagctgggcgtggtggcacatgcctgtaatcccagccaatctggaggctgaggcaggagaatcgcttgaacccgggaggtggaggctacagttagccaagattgtgctattgcactccatcctggttgacagagtgagactctatctttaaagaataggctgggtgcggtggctcatgcttgtaatcccagcactttgggaggctgaggagggtggatcacctgaggtctggagttcaagactggcctggccaatatggtgaaactccatctctactaaaaatacaaaaaattttacaaaatcagccgggtgtggtggcggatgcctgtaatcccagctactcaggaggctgaggcaggagaatcagctgaacccgggaggcagaggttgcggtgagccgagatcatgctattgcactgcagcctcggcaacaggagtgaaactccatctcaaaaaaaaataataattaattaattaataataaataaatagcttcatgaggctagtgactaccatagtggactatgcgactctagacacttcatcccttgcatgctgtgggtcttcaacgtcttaattcctaccactgcctcctggcaaagcatttgattcctctgttttttcaaaaacgttttctctgcttgtgctctgttaaccgtgtcctggggcaggcggcacttttgctattcatctacggatgaggcccgacaagctatttgcctccacagcggaatcttcctgctgctcttccggggcaggaatgcagcacccctgagctttgttttcaaaatagcatttccccccctgcttcccccacgctctaccctctttgatgtataccaatgtgtagaaaaagaccaagaagatatctaccaaaatgtcaatggttatgtttgggtagaaaaattatatatcacctttatttttctttcttgtgcctttttagtttttctacaatgaacaggtagggcttttgaaaggtataaaaatagttataaaacaattctctttggcgttcccaggaggacagcaaaggaaagtttcagcaagggaaccttgcggcggctgggagagcagcctgtccaggtggggtgaggggctgcagaggggcccacaaagaaaacacagaaccgaggaactagccggcaagtttgactatgcggaaaattggattaggacgggtttacagagttgctggagagtgtgggaagactcacagattccaacaaagctgagcacgtgaaaaaaagaagacgttcactccagggaaaacaaaagggaaatacatgtagttgtcactgatacctacatagccatcataaggaagacactaaataaggctttagccaaaattgtgttaaaagaccttgagaagggcagggctcggtggctcatgcttgtaatcccagcactttgggaggctgaggggggcggatcacctgaggtcggatgttcaagaccagcctggccagcatggagaaaccctgtgtctaccaaaaatacaaaattagccggacgtggtggcgcatgcctgtaatcccagctactcaggaggctgaggcaggagaatcgcttgaaaccgggaggccttggaggttgtggtgagctgagattatgccattgcactccagcctgtgcaacaagagcgaaactccatctcaaaaaaaaaaaaaaaaaagatgttgagaaggcaaggaaagaggtgaggtaagacagttaaatcctccaagttcataaatcctcaagttcctccaaggaagcccattggtaatatctgcaactgaaattttaagaagtgctgatataaacctgttattggagatatggggataaataccagaaaaaaatagctaaaaaggagttcaaagtggttggatctgagaagcaggacttgggtagggagttggggagcagaaggcggctgtctttcctctaagcctttttcttctattggactctttaaaaactcagttcctatatgattttattaaagataaaaaattttggccaggtgcagtggctcatgcctgtaatctcagcactttgggaggttgaggcaggcggatcatttgagatcaggagttcaagaccagcctggtcgacatggcgaaaccctgtctctactaaaaatacaaaaattagctgggcatggtggcaggtgcctgtaatcccagctacttgggagtctgaggtgtgagaatcactggaacccaggaggcagaggttgcagtgagctgagatcgagccgctgcactccagcctgggagacagggcaagactctatctcaaaaaaaaaaaaaaaaaaaaaaaaaagaccaggcgcggtggctcacgcctgtaatcccagcactatgggaggccaaggcaggcggatcacgagttcaggagattgagaccatcctggctaacacggtgaaaccctgtctctgctaaaaatactagctgggcatggtggcgggcgcctgtagtcccagctactcgggaggctgaggcaggagaatggtgtaaacccgggaggtggagcttgcagtgagccgagatcgcgccactgcactccagccagggcgacacagcgagactctgtctcaaaaaagaaaaaaaaaaattaaatgtcatttaaacaaatgccctccaataaccagaaaaaagatgtggcaatgctttggctttctctttctagtgatgtcaaaaggatccctgctacatgggctgatcttggttggaccacgttgttgtcaagcacagtaacagaacgggacaccctgcccatgcaggctgaatgactatgactcctagggcaggaaaggactcctgccactgccctaccctcagccccgcagctcgacagtcccgtcttcctccgacagacagggctgcagatgcttttttttttgagacggagttttgttctgtcgcccaggctggagtggagtgcagtggcatcatctcggctcactgcaacctccgcctcccaggttcaagcattctcctgcctcagcctcccgagtagctgggattacaggtgcacaccaccatgcccggctaatttttgtatttttagtggagatggggtttcaccgtgttggccagcctggtctcaaactcctgacctcaagtgatcctcctgcctcggcctcccaaagtgctgggatgacaggcatgagccactgcacccagcctccatttaaccatttttaagtgtatggttcagcggcagtaagtacattcctagttgtacaaccatcacacccatctgtctccataactttttcatcatcctcccctgaaactgcacccattaaacactaactccccattctcccctccccccagcccacaaaccaccctcttaatttctgtccccatgattttgactaccctagaaacctcatataagtggaatcataaaacatttttctttttgtgactagcttatttcacttcacatgatgttttcaatgttgtagcgtgggccagaattttctcacattttcaggcttactaatgtatctccttgtatgaatctaccacattttgtgtgtccattcacctgtcgatggacacttgggtagcttctacttggctgttgtgaataatgcagctgtgaatgtaggtgaacaaatatacgttgcggtccctgctttaattattttgggtctacacccagaagtggaattactgaggctgggcgtggtggctcacacctgtaatccaagcactttgggaggctgacgtgggaggttcacctcagatcaggagttcaagaccagcctggccaacatggtaaaaccccgtctctactaaaaacacaaaaattagccaggcgtggtggcacgttcctgtaatcccagctactcgggaggctgaggcaggagaatcactggaatccaggaggcagaggctgcagtgagctgaggtggcgccactgcactccagcctgggcagcagagtgagactccaccaaaaaaaaaaaaaaaagtggaattgctgggttggatggtaattccacacttagttttgtagggattcactgtactgtttcctgcagcagcggcctcattttacattcccacagaatccacatgggttccagtttcttcgcaccctcaccaacacttgttattttatttcttttttttttagagataggatctcacgatgttgcccaggctggtcttgaactcctagtctcaggtaatcctcctgctttggcctcccagagcattgagcttacacacgtgagccgccaggcccagcaaacacttgtttttttttgtttttttgaaacggggtttcactctcgttaaccaggctggagtacaatgatgtgatctcggctcactgcaacctcccactcccgggttcaagcgattctcctgtctcggcctcctgagtagctgggattacaggcgccgaccactacacccaggtaatttttggtatttttagtagaaatggggtttcaccgtgttggccagggtggtctcgaactcctgacgtcaggtgatccacctgcctcagcctcccaaagtgctgagattacaggcaggagccactgcacctggccctttcctttccttcctttcttctttcgatttatttatttatttatttgtttgtttgtttgtttgtttatgacagagtctctctctgttgcccagactggagtgcagtggcgcaatgtcagttcactgcagcctctacctcccgagtttaagcgattcttgtgcctcagcctcctgagtagctgggactacaggcgtgcaccaccatgcctggctaacttttgtatttttaatagagatgggtggggtttcaccatgttggccaagctggtctcgaactcctggcctcaagtgatctgcccgccttggcctcccaaagtgctgggattacagatgtgagccactgtgtggcatttgtttttttcttttaaataatagccatcctagtagatgtgagcactgatgttttcctctcttaatcttgctcagtaggacagtggtttagttgtaatggaaaactctgggttttattgggctgagttggcctgaggtgccaaggctgcactgggggccacagagatagcctggtactattagaaaggcctaggggagatgaaatttaccaccttgcagcctagtcctccaacagacttgagtgatggttaatggcacggacttcagacccagagcacccaggcatggtgtgtcatatccgtaatgccagcactttggtagactgaggtagaaggattgcttgagcccagaaagaagttcaagactagcctgggcaacatagtgagactctgtctctaccataaaaaaaaaattagccaggcgtagaggcatgcacctgtagtcccagctactccgcaggctgaggcaagaagatcacttgaaccctggaggtcaaggctgcagtgagctatgatggcaccactgtactccagcctgggcaacagaatgacaccctgtctgtaaacaaaaaaaccctcctttccacattcagcccacaaatctttcaggaatgaccattatacaccaagtaccatgctagacacaggggattcaacaataaacaaaagcacacaatgccctgccctcatggagcttatagtctagtgagggaaaaagatgttagttgaattatcacctttcaatgaatgtgtgattacaaaatgaataaaacaaatgctttgatggcagaggctctagcagtacctcagtgttccttctgtccctctttatgagtaatagaacctttgatttttacatagacatatgggtacctagaataaagactacattttccaggcttcttgcaaccagatgtggccttgtggctaaattctggccagtcctacatatgcagaagtgggatgttcaacttgtaggagatgtctgtaaagggaggaggcttgcccgtttttcctctttcttattcccacttgtgggaatgtggacataatggctggagctccagctgctgtcttggactatcaagcgaccttgagaatgaaaaccatgtatattggagcaagaaaataaaggaagcccgtggggctggtgtcgtggttcacacctgtaatcccagcactttgggcaagagaatcacttgagcccaggagttcaagaccaacctgggcaacatagtgagaccccttctctactaaaaatttaaaacatagtgaagcacagaggtgtgtacctgtgatcctagctagttggaagactgagataagaggatctcttgagctggttcagctctgttgtccaggctggagtgcagtgagctatgattgcaccactgcattccagcctgggaaacagtgcaagaccctgtctcaaaacagaaggaagaaagaagaagaaggaggaggaggaaagaagaaggaagaaggaagatgaagaggaaggggaagaaggagaaagcagcagcagcttggctcttaggcaccatgaggcccaggacttttttttttagagatgaggtctcactatgttgcccaggctggagtgcagtggctgttcacaggtgtgatcccactactgatcagtacaggagtttttttgtttttgttttttgttttgttttttgagacggagttttgctcttgttgcccaggctggagtgaaatggcgccatctcggctcactgcaacctccatctcccgggttcaagcgattctcctgcctcagcctccgaagtagctgggattacaggcatgcaccaccacacccagctaatttgtatttttagtagagatggaatttctccatgttggtcaggctggtctcaaacttccgacctctggtgatccgcccacctcggcctcccaaagtgctaggattacaggtgtgaacaaccgcgcccggccagcacaggagttttgacctgctccgtttctgacctgggcctgttacccctccttaggcaacctggtggtcccctgttccttggaggtcaccatattgatgctgaacttagtgtggacacctgattggcccagtgcactacagcccagaactcctggactcaagtgatcctcccacctcagcctcccaagtagccgggactataggcaggcattaccatgcccagcacccaggacttctaagtgcaaaagaaatgaggtttaattttgtgtaagcccctgttatttggagtttttctgtggtttgccactgtaacaggaagatgtagttctatgagcaaatgtaacacggaacttgacccataccaggagggcttctttgaggaaatgacacttgggttgagttagcaatagagtgaggaggaaagggttttcaagcaaaggaaaagtcctatgcaaaagtcctggggtagaaaggagcttgctgtgttccaaggaagagaagaaagaccagggtggctgggatagaaaaaacaagtagaggatcagcacgaaatgaggttggaaaggtgacaacacagggcaccataagcctgtcaaggcttttgccaaagatcccaagagtaatgggaggccactgaaggggttttagtgaggagattagagggctagattggttctcctggctagtagctccatccatctggaaggcagctgccatctctcaaccccaggatatcttagaggctgggatcaaatgttgtttatctgtggatgaactttttttttttttgagacggagtctcgctgtcgcccaggctggagtgcagtggcagtgatctcggctcactgcaggttccgccccctggcggggttcacgccattctcctgcctcagcctcccacctagctgggactacaagctcccgccacctcgcccggctaattttttgtatttttagtagagatggggtttcaccgtgttagccaggatggtctcgatctcctgacctcgtgatccgcccgcctcggcctcccaaagtgctgggattacaggtatgagccaccgcgcccggcctggatgaactttttataaaactatttttttgacagaatcttgctttgtcacccaggctgcagtacagtggcacgatctccactcactgctacctccacctcccaggttcagacgattcccctgcctcagcctcccgagtagctgggactacaggcatatgccacgccatgcccggctaactttttgtattttaatagagacggggtttcaccatgttgaccaggatggtctcaagctcctgacctcgtgatctgcctgcctcggcctctcaaaatgctgggattacaggcatgagccacagtgcccccggctataaaactgttttttaaagtgtggtaaaatagggccaggcacggtggctcatgcctgtaatcccaacactttgggaggccgaggcaggtgaatcacctgaggtcaggaattcaagaccagaccagccaacatggcaaaaccccatctctactaaaaatacaaaaattagccaggcatggtggtgggctgctgtaatcccagctacttgggaggctgaggcaggagaatcgcttgaacctgtgagttggaggttgcagtgagccaagatagcaccactgcactccagcctgggcaacaagaaggaaactctgtctcaaaaataaataaataaataaataaatgctgtgttaaaatatatataacatttgccattttaactattttaaagtgtacaattcagtggctttaattacattcacaatgttgtgcaaccatcaccactatctccaaacatttttgtgaggccaggtgccatggctcacacttgtaatcccagcattttgggaggcgaggcaggcagatcacttgagcccaggagttcaagaccagcctgggcaacatggcaaaaccttgtctctacaaaacacacacaaattagctggatgcctgtagtcccagctactcgggaggccatggtgggaggatctgggggaagattacctgagcctgggaggaggaggctgcagtgagacgtgatcacgccactgcactctagcctggacaaccgagccagaccttatctcaaaacaaaaacaaaaacagaaacaaaacagccccacaaacttttttatggatgaacttttgcacacagtaattatttaccgcatgttggactgaactacataattgcagcagtcactgtgtgtgaattcctagaaagtgggctgcggaccatgaggaagggttgaccaagtcagatcagagatagctgggaccagcctgaggaatgtcacacccaggtcagcagctctgtggacctgccagctgtccttggatacgtcatttggtgtgctttacttaagaggaagaatcaggcccagcgcagcggatcatgaggtcagaagatggagaccatcatggctaacacggtgaaaccctgcctctactaaaaaacaacaacaaaaaaaaaaaaaatagccgggcacagtggctcacgcctgtaatcccagcactttgggaggccgagcatggcagatcacgaggtcaggagatcgagaccatcctggctaacacggtgaaacccctctactaaaaatacaaaaaaattatccgagcgtggtggtgggcacctgtagtcccagctactcaagaggctgaggcaggagaatcacttgaacccagaaggcggaggttgcagtgagccgagattgcgccactgtgctccagcctgggcaacagagcaagactccgcctcaaaaaataaaaaaataaataaataaaagaggaataatcatccccagaactggagtcagagtagagtaaaccgatgtctgaccactcccaggatcttaggaaaacagtctgacttcattcattgttctacccaccaaggaatgccgaaaacaatggagaactggttgttctgtgtttctcaacttgaggcagtttcctggatatacacagtggtatgtctgggacacgtgtagcctcaggataaacatggggcattcatttgacttgatgggaaatgatttgtattattttattttaaaacaagtgtgcacgtattatgggacaataaacaacttatgatgaggtttaagagtaaaagatgaggctttgaagaaattgtacctgcagcttgggcctcactctcagactttcagtaatatttgcccttttcccttgccaatagtggtattttccatctcgaaaaaaaaaaaaaagattctcataggagtatgaaccctactgtgaactgctcatgcaagggatctgggttgcacacgccttaatgaaaatctaatgcctgatgatctgaggtggaacagtttcatccaaaaaccatcccctccgcccctcaatctgtggaaaaattgtcttccatgaaactggtccctggtgctgaaaacattggggactgctgttttagggcattttggctgtgctggtgatgttgccttcttctggaaacttataacagcttgtatctctgagaatgaatggaaaagactgctccagacccaaagccatgctgtccacaaactccttctaggaaatgcacttttacaaaggatcttttttttttttttttttttttgagacagagtgtcgctctgtcacccaggctggagtgcagtggcacagtcttggctcactgcaacctctgcctcctgggttcaagggattctcctgcctcatcctccccagtagctgggactacaggcgtgtgccatcatgcctggctaatttttgtatttttagtagagatggggttttgccatgttggtcaggctggtctggagctcctgatcctaagtgatctgcccacctcggcctcccaaggtgctgggattacaggcgtgagccaccatacgtggccagaagaacgtaatctaatgagactttgagagactgggagcttggtgaaaactgctcttggtgtatttccttccttctgcttgacttcagagctccaccttgatttcctgattctgtacttacgttgtgaaaggaggatggttggccgggtgcagtggctcacgcctgtaatcccagcactttgggaggctgaggtgggaggatcacttgagttcgggagttcgagaccagcctgattaacaaggagaaactacgtctctactaaagatacaaacttagccaggcgtggtggcaggcacctgtaatcccagctactcgggaggctgagccaggagaattgcttgaacccgggaggtggaggttgtggtcagccgagatcatgccattgcactccagcctgggcaacaagagtgagactctgtcgaaagaaagaaaggaagaaagaaaggaataaagaaagaaagaaagaaagaaagaaggaaggaaagaaggaagaaaggaaggagaaaggaaggaagggaggaaaggaagggaaggaagggaaggaaggaagggaggaagaaagagaaagagaaaggaaggaagggaagggaaggaaaggaaggaaggaagggaagggaagggaaggaaaggaaggaaggaagaaagggaaggaaaggaaggaaggaagatggtgggagggtaaaggctggttgaagctgctaattctaatttgtagtgttccctgcttcttctcctccctcgctattttgtgcctttggtctcaggaccttcctcagccgtcccttcttccaggcagactttgctcagtgcctcactcagtgtgaatcccgtgccttctacctccccgcataatgtcccccaaacttcgtcagagtacaaattcagctgcactgtggttctcatttagtcatctttgttcttcactagatcaaaaattcttgaggacagaaaagcgatttcctgtcaagcaattttcccttcaaaccttgggtctagcacatggcacatgacatttactaactaaaacatacattgagtaggtggcaggagtaagcagttgtttacaaaggtagctgcaatcattttttgttgttctttttttttttttttttttttgagacgaagtcttgctctatcatacaggctggagtgcagtggcacaatctcagattactgcagcctctgccccctgggttccagcgattctcctgcctcagcctcctgggtaactgagattacaggtgcacgccaccgcgcccggctggctgcaatagtttttcccatccctttatgcaaatcccttttgcaacgtgactatgctgcgtcaaagggtagggattattcctccaccccttgaatctgggcttggccaccgggacattagcaaacgtgatgcaagcaggggcttgaaaagcacttgcacaaaaggaattacccctttttgacagcggctgtaaccctgagaccggtgatgtgagcaagcctgggctggcctaatagagaggccttatgcagcagggctgagcccaggcagcagcctgcctatgtccaaccagccaattgccagacacgtgagtgaggtcatcttaggccatccagccccatttaagaccctagaggactacagacacatgaatgactccagggaagaccagcagcagaaccactccggtgacctcagcccaaatcgctgatccagattcatgagcaagccgttaagtctggccatggtttgtaacgcagtgatcaataactgatatagaaggtactttgtatgtgatcgttccttcatttggcgtctgttcctacttttcctttagtggctagctcttgtttttgcctgtccagactttatttcactttcttcctgtagcggcaagtaggtactttctgtaggaaaattcttagaaatcacagtgctgaatcaaagagtagctgacattctgactatctctccagcttccactccacctcctccggggttagtcatatagtttgggtagggccaggcatggtcgctcacgcctgtaatcccagcactttgggaagctgaggcaggattatttgagcccaggagtttgagaccagcctgggcaaaatagtgagacctcactgctatttattattactattattatttattattattatttttttgagacagagtcactctgttgcccaggctggagtgcagtggcacgatcttggctcactgcaagctccgcctcctgggttcacgccattctcctgcctcagcctcccgagtaggagggaatacagtcgcccacctccatgcccagctaaattttttgtatttttactacagatggggtttcaccatgttggtcaggctagtttcaaactcatgacctcaggtgatcttcccacctcagcctcccaaagtgctgggattacaggcatgagccaccacaccaggcctattattattattattattattattattattattattattattatttttgagacagagtctcgctctgttgcccaggctggagtgcagtggtgcgatctcggctcactgcaagttccgcctcttgggttcacaccattctcctgcctcagcctccccagtagctgggactacaggtgcctgccaccgtgcccagctaatttgtgtgtgtgtgtgtgtgtgtatttttagtacagatggggtttcactgtgtgagccagggtggtttcgatctccagacctcgtgatctgcccgcctcggcctcccaaagtgctaggattacaggtgtgagccaccgtacctggcctattattatttttttaaatgaaaaaatggtttgggtaggatgtaactcacttgtagttctagatgcgagccacattaggactacacttgatcttagccaaaaggctgagaagcaataccacattaggtctaaataaatcaagcaaaataatcctatcttccattctatgattgtagaaaatcctccagatttgaatgagaatactccccatagtcctaaatgatcccggcccaatatcttgttactttgtagaaagccatcctgaggatttgacagcatgggaaggagttgaagaatccagagaaacagaaccaggctttattgacctacccctgaagctgcattacctgtggaccttcagttacggaagttactgtgttacctttagtattcaagccacattgtttgggttttctcttactttcaataagagcattctcactgacaagaacaaaaggtgatacatgttgatcaaatatttttccattgcgtcatgagggttatccacttccttgattgcagtaacactctttgctgtcaaaagccctattttaaacattccaaggccgggcgtggtggctcatgcctgtaaactcagcactttgggaggccaaggcagaggatcacagggtcaggagatcaagaccatcctggccaacatgctgaaaccccgtctctgctaaaaatacaaaaattagcagggtgtggtggcgcatatctgtaatcccagctactcgggaggctgaggctggagaatagcttgaacccaggaggcggatgttgcagtgagccgagatcttgccattgtatgccagcctgggcgacaagagcaaaactccatctcaaaaaaaaaaagagagagagaaatataaggatgtctgagtgcagtggctcatgcctgtagtcccagcactttgggagactgaggcaggtggatagcttgagcccaggagtttgagaccagcttgaagaaaatggtgaaaacctatctctacaaaaaaacccacaaaaattagccaggcggctgggcgcggtggctcacgcctgtaatcccagcactttgtgaggctgaagcaggcggatcacctgaggttgggagtttgagaccagcctggccaatatggtgaaaccccgtctgtactaaaaatacaaaaattagccggtgtggtggtgggcacctgtaatcccagctactcgggaagctgaggcaggataatctcttgaacctgagaggcggaggttgcagtgagccaagatcatgccactgcactccagcctgggtgacagagcaagactctgtctcaaaaaaaaaaaaaagaaaaagaaaaaattagccaggcttggtggcacgggcctgtagtcccagctacttgggaggctgaggtagggggatcacttgagcccaggaggtggaggttgcagtgaacccagattgtgccactccactccagcctggacgacagagtgagaccctgtctcaaaacaataaaaattttaaaaaaagaagtataagggcaagcaggtattgtaggcagaagagtggcccccaaagatgtccatgtcccaactccccatatttgtgaatgtgttacctttcatggcaggaaggattttgcagatgtgactattgcaataattttgagattgggagatttttctggagtacctgggtgggtcacgtgatcacaaagacatttataaatgaaagaaggaaaaaggagggtcagagtgatactatgagagaaagactctgctggccggagatgtggggtttttttgagacagggtctggctttgttgcccaggctagagtgtagtgtctcagtctcagctcactgcagcctcgacctcctgggctcaggtaatccttccacctcagcctcccgagtagctgggactacaggcacgtactatcatgcacagctaatttctgcgtttgtttttttgtttgtttgtttgtttttgtagagacagggctttaccatgttcccaggctgatatcaaactcctgggcccaagtgatcctcctgccttggcctcccaaagtgctgggactacaggtgtgagccaccacgcctggcacattgatggttttgaagatggaagggggccaccagcagaggagtgcaggtagcttctagaaagtggaaaatgcaaaaaaaaaaaaaaagaattttcctctagagattccagaaaagaatgcaggcagcttctagaaagtggaaaatgcaaaaaacaaaacaaaacaaaacaatttgcctctacagcttccagaaaagaatgcaggcctaccagcacattgattttagcccagtgacattcattttggacttctgatagattgtaataagataacaaaagtatgtagctttaagccacaagataacaaacgtatgttgctttaagccgttaagattgtaacgtgtatgtgatggccaataaaatagaccaaatttaaaaatgagaaatataaggatgtccgggcgcagtggctcacgcctgtaatcccagcactttgggaggccaaggccggcagatcacgaggtcaagggctcgagaccatcctggccaacatggtaaaaccccatctctactaaaagtacaaaaattagccgggcatggtggcgggtgcctatcttcccagctactggggaggctgaggcaggaaaatctcttgaaacgggaaggaaagcagaggttgcagtgagctgagatcatgccactgcactccagcctgggcgaaagagcgagactctgtctcgagaaaaaaaaaaaaaattgtggtaatttgttacagcatcaatagggaattgatacagaagaaaagagagaaaaatatttgtagatggtacagtcaatacatatgaaccagccgggcgaggcggctcatgactgtaatcccagcactttgggaggccgaggcaggtggatgacctgaggtcaggagttcgaatccagcctggccaactcaaaaaagaaaaggccaggcttggtggctcatgcctgtaatcccaacactttgggaggccaaggcgggtggatcacctgagatcatgagttcgagaccagcctggccagtgtggtgaaaccccgtctctgctaaaaatacaaaaaattagctgggtgtggtggcacacacctgtagtcccagctactcaggaggctgagacaggagaattgcttgaacccgggaggcggaggttgctgtgagccgagatcgcaccactgcactccagcctgggcgacagagcaagattctgtctcaaaaaaaaaaaaaaaaaaaaaaaaaaaatatatatatatatatatatatatatatataaatcaacaagatcttagcgataaacaaaattttgcagtaagaccaaatagaagatcaacacactaaactcaataataataaacagatgaatggataaataaaatatggtatatagtacatgaaatattattcagcctgaaaaataaaaattcttttttttttttttttgagatggaatctcactcttttgcccaggctggagtgaagtggcgcaatctcggctcactgcaacctccgccctgcgggttcaagtgattctcctgcctcaacctcccgagtatctataaaaaatacaaaaattagctgggtgttctagtgcatgtctgtaatcccagctactcaggaggctgaggcatgggaatcgcttcaacccaggaggcggagattgcagtaagccgagactgcaccactgtactacagtctgggtgacaaagcaacgctccatccatctcaaaaaaaaataaaataaggtaaaatagggaaaatttgataatgaatgtctggttaaacatgccaatcaaatctgatttctttttttttttttgagacagggtcttgctctgtcacccaggctggagtgccatgtcatggtctcagctcactgcagcctccatctcccgggctcaagtgatcctcctgcctcagcttcctgagtagctgggagtacggacatgtgctaccacatccagctaattttcgcattttttgtagacacgggatttcatcatgttgcccaggctggtctcaaactcctggactcaagcgatctgccttgcatggccttccacagtactgggattataggcaagagccacagctctggcctgaatccaaatatttatttggttcttcctgttaccccaataaagtaacagcaaagaactaaaaatgtgataaatccacaggtgaaagagaacagttgcagagaatatgagtgatgtcgaccccattttggaagacgggaaggattagcgataattgatttaggtttcagctttctcttttctaggtcctgcagagagagaagaccacgagaagcaaaaagcagcaagatgactggaaagattcaggaattgggagcagtgaataactcaaagtgcagtggaggttggtgctgaacatcagcattagctgacaatttgtaaaagaagcagttcctggccaggtgccatggctcacgcctataatctcagcactttgggagaccaaggagggtgtatcacgaggtcaagagatcgagaccatcctggctaacacagtgaaaccctgtctctacgaaaaagaacacaaaaaattagccaggtgtggtggcacgggcctgtagtcccagctattcgggaggctgaggcaggagaatcactttaacctgagaggcggaggttgcagtgagccgagatcgagtcactgcactccagcctgggtgacagggctagagtccgtctcataaataaaatgaaataataaaaaacagatgttcaaactcactggtaatcaatgaaatgcaagttaaaacaatgagataccattttatacctcgcagagggacaaaaattagagttagaaaatagcagggtgaaaattggagaaatgatcatccttttgtctcattatgggagtgcaaactggtgcagatatttaagaaacaaatgtggctgaattggggaagtcaaggatataagacccagcaaccagcaatctcagcctgggttgggaggtgaattctgtacatctgagagttcgcccatccacaaggggtcgtgtacaaggatgttcactgcagatttgttgtaaaaatgaggaggtggtgtccatcactaatggaatatttgggtgcatctcatgtgctgctgctcagcggtaggacccaggagcgaggtggacaggcagcggccggaggaggtcagaaaaacagtgctggggctggacgcagtggctcacgcctgtaatcccagcactttgggaggcagaggcgggtggatcacttgaggtcaggagttccagaccagcctggccaacatggtaaaaccccgtctctactaaaaatacaaaaattatctgtgcgtggtggcgcacctgttatccccacctactatggaggctgaggcaggagaatcgcttgaacccgggaggcggaggttgcagtgagccgatactgtgccactgcactccagcctgggcgacagagtgagactccatctcaaacaaacaaacaaacaaacaaacataaaaacagtgttggaaaggaatagaaaaagattcttggacccatactgtttatttaaatagaaaacatacaacatatgtggcttttattgcagaaataataaaaatagaaaagaaaagaagccgggcacggtggctcaagcctgtaatcccagcactttgggaggccgaggcgggcagatcacctgaggtcaggagtttgagaccaacctgaccaacatggagaaatcctgtctctactaaaaatacaaaaaattagccgggcatggtggtgggcacctgtaatcccagctactagggaggctgaggtaagaaaatcgcttgaacccatgaggcagaggttgcagtgagccaagatcgcaccactgcactccagcctgggcaacaagagcaaactctgtgttaaaaaaaaaaaaaaagaaaaagaaaaagaaaaagaaatcaaaaagaaaaaaaaaaccatacacacaaaacaggagtatgttttttactacacctatgtttccaagaaacacataatggtgggtgtttatgtgggaggggaaggggaatgtggaccaagagtaagggtggggttcaaatgaatgggagaccgtgaaagaccatgggcaccatgagtggatgaacctgatgagctcaactctccgcacacaagacagccgcagcccccagtagcctttttcatgcaatttcagcaaaaacctcagtggaatttctggaggactttgcaatataattctaaagattttctggaagaatacattatgaaagaaaaatttgaaaactttgaaaaagaagatcatctatccgtgacttggcctaccagataatagaatgtataaataatgcagcagtcactagaacagtatgctatgtgcacactggaatggacagaagaatcaatagaagagaaaaaacgggcagaaatagacctcaaaaattatcaaaagctattagatattaagagtggcgtcaatcggccaggcaccaaagctcacgcctgtaatcccagcgctttgggaggccaaggtgtgtggatcacttgaggtcaggagtttgagaccagcctggccaacatggcaaaaccccatctctactgaaaatacaaaaattagccaggcatgtggtggtgcacacctgtagtcccagctactcaggaggctgaggcagaagagttgcttgaacccgggaggcggaggttgcagtgagcggagaccgagctactgcactctagcctgggtgacagagcgagactcggtctcaagaaaaaataaaaaaataatatacaaaaaattagtcgggcatggtggcatgcacctgtaatcctagctactcaggaggctgaggcaggagaatcgcttgaatccaggaagcggaggctgcagtgagccaagactgtgccactgcactccagcctgggcaacaagagtgaaactctgtctcaaaaaaaaaaaaaaaattgtggcatcaaccagtgggggaaaggctgaattgacaaatgataccagaaaaaatgactaaaaatttgagagtaaaggtagaaaaatacagagcaatgattaagacccttgaaagtaagatggggcaacatagggagaccccatctctacgaataatctttaaaaaactaaccaggcttggtggcacacacctgtggtctcagctactcaggaggctgaagtggaagatcaactgagcctgggaggttgaggcttcagtgacctatgatcgtgcccctgcactccagcctaggtgacagaggagacgctgtcacacatacacacacaaagacctttgaaagtaaacagacttggggtttgaatgccagttttgccactgattagctgtgtaaattgcaggcaagatccttaacttcccaaagcctaatttctcccatatttaaaagcaaggtaataaaaatgactacctcacatgattatgaggattaaaagggataatgagtatacaaaagtaaaaccacggtgcctattacacagaatgtgcctcatacaagttagttatttttatgtctactctgtaccacatgcaaagtaaggtgcaaaatgaaaccataaatgttctagaaagaaaatgagtactattatgattgtgggtggtagaggacttcctaaatatggccctaagggtggaaaacaggaaggaaaagataatagttctgactaccaaaacaaaacaaaaagcccaccacattctttttcttttgagacagggtctcgctctgtagcccaggcagtgcagcagcaagatctcagctcacccacaggttcctcctctcaggtctgagcaattctcccgcgtcagactctggagtacctgggagatttttgctttttttttttttttgagacggaatttcactcgtcacccaggctggagtgcaatggcgcaatcttggctcactgcaacctccacctcccgggttcaagtgattattctgcctcagcctcctgagtagctgggattacaagcacccgccaccacgtccggctaatttttgtattttcagtagacatggggtttcaccatgttggccaagctggtctcgaacacctgacctcaggtgatccacccacctcgtcctcccaaagtgctgggattataagtgtgagccaacgcgcccagccctaatttttgcatttttgtagaaacaaggttttaccatgttggccagtctggtctcaaactcctggcctcaagtgattcacctgccttggcctcccaaagtgctgggattacaggcatcagccaccacatctggctcaccatgctttttggtgccaaaatctcttcacaaagtcgaaacacaaatggcaaactgggggaaatgcttgcaacatatgtaatagacaaatggtttatggtctcttactaatctatgaggaaaaggtggatacgacaatagaaaaatgcaccaagaacattgacaaataaacaggctgggcgtgacagccccacgcctgtaaacccaacactttgagagcccacagcaagtggattgcttgagtccagtagttcgagaccagcttgggcaacatggcaaaaccccgtctctaccaaaaacaaaaaacaaaacaaaaaaacataaacaaaaaagaggttacaaatatataaatgggggggatggcggggcgtggtggctcacgcctgtaatccctttgggaggcactttgggaggccgaggcgggcggatcacctgaggtcgggagtttgagaccagcctgaccaacatggtgaaaccccatctctactaaaaatacaaaattagccgggcatggtagcacacgcctgtaatcccagctactcgggagtctgaggcaggagaatcgcttgaacctgagaggcagaggttgcagtgagccaagattgcgccattgcactccagcatgggcaacaagagtgaaactgtgtctcaaaaaaaaaaaacaataaaaaaaaattaatgaggagggacgttcgacctccctaataaagaatataaatgaaaagaaatcccatttatcaaatattaaattagtacaatacgtttttatgatactatttcatttcactaagcatacttttgttttgttttgtttttgaggtggagtccccctctgtcaccaggctggggtgcagtggtgcgatctcagctcactgtaacttccaactcccaggttcaagcgatcctcctgcctcagcctcctgagtagctgggactacaggtgtgcaccaccatgcccacctaattttttgtatttttagtagagacggggtttcaccacattggccaggatggtctccatctcttgacctcgtgatacacccacctcagcctcccaaagtgctgggattacaagcgtgagccaccgtgccccaccttgtttttcttttttgagacagagtctcgctctgtcacccaggttggagtgcagtggtgcgatcttggctcactgcaaactctgcctcccgggttgacgccattctcctgcctcagcctcccgagtagctgggactacaggcacctgccaccatgcccggctaatttttggtatttttagtagagacggggtttcactgtgtttgccaggatggtctcgatctcctgacctggttatctgcccgcctcggtctcccaaagtgctgggattacaggcctgagccaccgcgcccggcaatttgtttatttttagtagagacagagtctggtcatgttgcccacactcatcttgaaatcctgggcttaagtgatcctcccgctttgacctcccaatacgccagaattataggtgcccggccttattcctttttatgactgaataatattccattgtatgtattaatatatatcatatttttgtggtggcatgcacctgctacttgggaggctgaggcaggagaatcacttgaacttgggaggtggaggttgcagtgagccgagatcacgccgctgctctccagcctgggcgacagggtcagactctgtctcagaaaaaaaaaaagaaaaaaaaaggaaaataatatataccacattttgtttatgcattcatcttcaatggacatttgagttgtttccagcttttggctattgtgaataatgctactgtttgagtcctggctttcaactcttttggctatacacctggctgtagaattgctggaccatatgtttattctgtgtttaactttttgagaaactgccaaacttgtttttgttttaaatgtcaggtttattaagaaatgatttacatgcagtaaaattcactttttaggtatacagttctatgagttttttttttttctttttttttttgagacagtttcactcttgttgagcaggctggagtgcaatggcacgatctcagctcaccgcaacctctgcctcccaggttcaagggattctcctgcctcagcctcctgagtagctgggactacaagcatgtgccaccacgcccggctaattttgtatttttagtagagacagggtttctctatgtttgtcaggctggtctcaaactcccaacctcaggtgatctgcccgtctcggcctctcaaagtgctgggattacaggtgtgagccaccgcacccagtcagttctatgagttttgcccaatacaggcagttgtataactgtcaccacaatcaaaatatagtatagctcggccaggcatggtggctcacacctgtaatcccagcactttgggaggccacggtgggtggatcacctgacatcaggagtttgagaccagcctggccaacaggcaaaaccccatctctacaaaatacaaaaattagccgggcatggtggtgggcgcctgtagtcccagctactttggagcctgaggcaggagaatcgtttgaacccgtggggcagaggttgcagtgagccgagattgtgccattgcactccagcctgggcgacagggcaagaccctgtctcaaaaacaaacaaacaaacaaaaagatatagtataactccattccccaaaagttctctgtgctcctttgtacttcaccgtctgcccttaccccttggcaactactgacctgatttctgtccttacaattttttgttttttagtcggaatcttgctgtgttgcccgggctggagtacagtggtgcaatcttggctcactacaacctccgcctcctggggtcaagtaatcctcccacctcagcctttcaagtagctaggacgacaggtgcgtgccaccacacccagataatttttgtattttttgtagagacagggtttcactatgttgcccaggctggtcttgaactcccaggctcaagtgatcctctcgtcttggcctcctaaaatactgggattatagtcatgagccactacgcccagcctgcccctataatttgatttttccagaatgttatataaatggaaccactggagcttggcttctttcattcagcacaatgtatctgaggttcatccaagggagtgcagtaatcatttgctccttttactgcagtatagtattccattgtatgactgcactacgtgtacttatccattcaccagttgatgaacatccattttaaaattttttttcgagacagggtcttgctctgtcacccaggctggagtgcagtggtgcgatctcggcttactgcaacctctacctcttgagttcaagcgatcctcccacctcaacctcctgaatagctgggattaaaagtgtgcgccgccacacccagctcatttttgtatttttagtagagacggggcttcgccatgttggccaggctggtctcgaactcctaacatcaagtgatccgcccgcatgagccaccacgcctggcctgtaaagcaatcttgtgtctctgctgcccccgccctgctacagtccttttctctctgcatatctgcttttattttctcccctgtgctccacttcacaagcggaatatggctgctgtgtagctcccagtccacatgttaaaatcccagccaccttcgaactgattcgctgcttctcagtccaatcctaaattcccagtgatcatctgagttggggctgtggtccatgccatgcagccatggccagggaggcagagtcagatagaagcaaaatggctcccaagaacccactctagtgatgtaatctgtgggtatgcttcccagagaaaagacgtggctacgaggctggggaaataacccaaaacataaagcaaatccgtttattgctctgatatttggactatttgaagttcaggatatttttttattttttatttttatttttatttatttatttatttattttgtgatggagtctcattctgtcacccaggttggagtgcagtggcgtgatctcagctcactgcaacctctgcctcctgggttcaagcgattctcctgcctcagccttccgagtagctgggattacaggcacctgccaccatgcccagctaatttttgtatttttagtagagatggggtttcaccatgttggccaggatgatcttgatctcttgacctggtgatcgccagcctcggcctcccaaagtgctggaattacaggtgtgagccaccgcgctcagccaggaatgttttgttttgttttctttttgagatggagtctcactctgttgccaaggctggagtgcagtggcataatctcggctcactgcaacctccacctcccgggttccagcgattcttctgcttcagcctcccaaatagatgggactacaggcacccgccaccacgcccagctaatagtttgtatttttagtagagacgaggtttcattatgttggccaggctggtctcgaactcctgacctcgtgatccacccgcctctgcctcccaaagtgctgggattacaggtgtgagccactgctcctggccaaccaggaatgttttaaagaaaataattccagttacgtttttgtaaaataaagtttgcatgaccatggccagttcatatagcagggtggaaacaggagaccacttcttgtgggcagcccaaatgaccaccctctcagatcccagctgcaccaaatcttagatcccagctgcaccaaatctctgtacctttccagtcttcaaggtgcagtaaactcaaaattaagtagtgagcattaacttttgcttccagggctcccaagtagagtctatttttaggaacagcttggatctttgaaaatgcagcttggcccggcgtggtggctcgcgcctgtaatcccagcactttgggaggccaagacagggggatcacctgaggtcaggagttcgagaccagcctggccaacatggcgaaaccccatctctactaaaagtacaggcatggtggcacgtgcctgtaatcccagctactcaggaggctgaggtaggagaatcgcttgaacccggaaggcggaggttgcagtgtgccaagatcatgccaccgtactccagcctggacgacagagtgacactgtcccccgccaaaacaaacaaacaaacaaaaaaaaacaagaaaaaaaaacaagaaaatagcactgattgcagaagacctgggtttcaatcctgatgctctcactgaatgctttgtcatcttgggcaaagcacccagctactctccatctcttcatctgaaaaatggaagtaataatattttatttctacctcaaagggctaattgagattcaaatgaaattatgtaattaaatagacagtactttgcaaattgtacagaatagcgaagtgtgtcacttgtatatccacaaacctcaccagactttggtacaaatagggaggataactgttgtatacaacataatgtggtagttaagaacaagttgatttctgcaaatggtgctggaacaattggatattaatatgtaagaaagggaaccatgatccataatgtgtaccatatacaaaaatgaacctgaaatgaatcatacccctaaatttaaacttaaagctataaactttcagaagaaaatatttataacttatggacaggcaaaaatttcatagataagacacacaaaaaacatgaaccgtaaaaaatgtttcaattagactcaataaatgaaaacctctgccctccaaaaacactgttaagaaaatgaaaagacaagacacaaattgaaagaaaatattttaaaaacacacatctgataaaagctttgtatccggggctgggtgtggtggctcacatctgtaatcccagtgctttgggaggctgaggcgggcagatcacttgaggctaacagttcgagaccagcctggccaacatagtgagacctccccccatctctattaaaaattaaaaaaaggaaaaaagtgggcaaaatatataaatagatctccactaggtaagagaaaaagatggcaagtacatgaaaaaaagttcaatgtcattagccatcgggtgcaaattaaaaccataatgagataccaccacgtacttattagagtggttaaaataaaaataagccgggcgtggtggcacatgcctgtaatcccagcactttgggaggccaaggcgggcggatcacgaggttcacacggtgaaaccccgtctctcctaaaaaaatacgaaaaaaattagccgggcatggtggcaggtgcctgtagtcgcagctactcgggaggctgaggcagcagaatggtgtgaacccgggagacggagcttgcagtgagccgagattttgccactgtactccagcctgggtgacagagcgagactccgtctcaaaataaataaattaattaattaaattaaataaattcataatacgaaatgttgtagaggatacagaataactggaagtttcatacatatacattgcaagtgggaatgtgaaaagggtacagccactttggaaaataggcagtttactatatttttaaagttattattattattattattattattattattattattattattttgagataggctcttgctctatctcccaggctggggtgcagcggcaggatcacagcttactacagccctgaccttctgggctcaatcaatcctcccacctcagcctcccgagtagctgggactacaagtgcacaccaccatgcccagctaatttttgtctttgtttcaaagagctggggttttgctagccctggtctccaactcctgggttcaagtgatcagctctccttaccctcccaaagtgctgagataacaggtgtgagccattagccaggcataatgacccatgcctgtaatcccatatacttgggaggctgaggcatgaaaatcgcttgaacccgggaggcagaggttgcagtgagccgagatcgtgtcactgctttccagcctgggcaacagagcaagactccgtctcaaaaaaaaaaaaaaaagaaaagaaaagaaatgacaaagattgctttgctggtcctggttccagatgctttcaggaccctgctgcatacctgtccatcagtgctatgaaagcacctctctatcctttcaaaactgccctttttttttcccttaggctcactcaaatgggtttctgttctttagaaccaaagagtcctacctaccacaatagaggtaaaaagagttatcatggagtagaaagacaagtcttggacccagcccatggggactgagaagcagagctgactttcttggcaatgggtgctgtgagccagagacggaatcctcccctcttctgttccttataaaataaatcgcatgaaaggtttaggccagctgagtgaacattagctatacaaagtgaacaagggagggtattatccaggttaaactatcatttgtttccagctgggaaggagcagagaggagaaactgggaggaagaaaaggcagtggaggaggggaggaaaaaaactgacatgatatcgtgccagaaaatgcttatatattcacatttggaggcttcttaccttcggatgaaaaatgctggtcaattgccaggtatttgtttgtaaattaggaatttatagtacatttaagtttactgtaaataaatgaaccttccataaaatcagctttctgacacatttccagacatttctccaaagcagcccatgagaaatcctgactctctttaccagcagaattaaataggagttttagtttctctgccatgttcctgcctttgccgttagctgggatgaacagaatgaatgatgcacagaggcgggtgagacaatggggctgattcatggtttgggaaaacagggaattgtcacagagctaacactggccctcctttttgccgaggacactgcaatgtttagctgaaagcatcttgcttggattcttccaaccactgggtaagcgtctaaatgagaaaagcaatatggggctcccaggatccctggggacgcttaaaacaatcctgagataccctggcaaagcttgtgatctttgtaaacaagcagagagatgtttttcaaacagctgttaatttcattaagaagcctaattttaaggtcccagaacaggcatttctttttatgccaggatcatctctgagttttatatttgcatgcagtcctggtagcttagcttggatgtcagtgttagttaagcttacatttggataggcattttcacttgagcttcaaaaagaatttacccttagactagactacatttgaccaaactaaagttaacgggcaattgagaactacttatttacatttttatcgttatcatattgcacaaactgttttgtgactttttcattgaacgctatagtttgaaaatattaacttgtcaacaaattttaatctataagataacttcaggcccggcgtggtgggtcacgcctgtaatcccagcactttggaaggccaaggcgggcggatcacctgaggtcaggagttcgagaccagcctgaccaacatggtgaaaccccccatctctactaaatatacaaaatcagctgggtgtggtggtgcatacctgtaatcccagctacttgggaggctgaagcaagagaattgcttgaacccaggaggcggaggttgcagtcagccaagatcgtgccattgcactccagcctgggcaacaagagcaaaactccgtctcaaaaaaaaaaaaaaaaggccgggcgcggtgactcatgcctgcaatcccagcactttgggaggccgaagcgggtggatcatgaggtcaggagatcaagaccatcctagctaacatggtgaaaccccgtctctactaaaaaaatacaaaaaaaattagccgggcatggtcacacaatgaaaccccgtctctactaaaaacacaaaaaattacctggccatggtggcgggcgcctgtagtcccagctacttgggaggctgaggcaggagaatggcgtgaacctgggaggcggagcttgcagtgagccgagattgcgccactgcactacagcctgggcaacagagcgagactctgcctcaaaaaaaaaaaaaaaagaaaaaagataacttcgaatagatgtgtagtgtttgtggatggaccatcgtttgtttaaccactcccttattgttggacaactaggttgttttttatttttcatagcaataaaccatgcttcagtaaaaattattgtagataaatctttgcacactttcttattttcctaaaaaaaaaattctgggcccggtgcagtggctcatgctggtaatcccagcactttgggaggccaaggtgggcgaatcacctgaggtcaggacttcatggcaaaaccccatctctactaaaagtacaaaaattagccaggcgtggtggtgggtgcctgtaatccaggtatcaggaggctgaggcaggagaatcccttgaacctgggaggtggaggttgtggtgagctgagattgcaccactgcactccagcctaggtgacaagagcgaggctccatctcaaaaaaaaaaaaaaaaaaattctggattttgcgttgctgggtcagaagagaagcattttttaatgttgttttttgttttttgttttcagacggagtttcgttcttgtcgcccaggctggagtgcaatggcgcgattttggctcacggcaacctccgtctcccgggttcaagcaattctcctacctcagcctcctgagtcgctgggattacagggacgcgccaccacgcccggctaattttgtatttttagtagagatgagtttctccatgtcggccaggctggtctcgaactcccgacctcaggtgatctgcctgcctcggccaatgtttttgactcacttcatactgagaaattgccctctggaatataatgtatacacttgcctaagcataaaattgctttccttcacacacacacagctctacggtttatttattaattttcttttttttaagtgattttcttgagttttccaggaaagtgagcatataatctacaaataataataatctttggggtttttttgtgtgtgtttcatctactagatgagcaaagtcgcaagaatttatgtttcagcattggtaagaatgggggtaaatggatgttctcaaaccctatgagtatacattggtaagtatttttggaggataatttgaggctgtgaaaaatttaaaattgcatatcctttcacctactgattacacttctaggagattattcttcacaagtgagcaaagatacacggataaaggtattcattaagaaattttccttaagagcaaaaattaaaataaaataaaaaattcatcagtaagaaatggttaaacaggccaggtgcagtggctcacgcctataatccccgcattttgggaagctgaggtggcagattacttgacctcaggagttcgagaccagcctggccaacatggtgaaaccccgtctctactaacaaaataaaaacaaacaaacaaacaaaaaaacaaatagccaggtgaggcggcaagtgcctgtagtcccagctactcaggaggaggctgaggcaggagaatagcttgaacctgggaggcggaggttgcagtgagccaagatcgcactactgcgctccagcttgggcagcagagcaagactgtctccaaaaaaaaaaaaaaaaaaaaaagccgggcacagtggctcacgcctataatcccagcactttggcaggccgaggcgggtggatcacgaggtcaggagatcgagaccatcctggctaacacagtgaaaccccatctctactaaaaatacaaaaaaaaaaaaaagttagccgggcgtggtgggaggcgcctgtagtcccagctactcgggaggctgaggcaggagaatggagtgaacctgggaggtggagcttgcagtgagccgagatcgcgctactgcactccagcctgggtgacagagcaagactccgtctcaaaaaaaaaagaaatggttaaataaattacagtagctaatactatgaaatactgtgcatccactgaagagaataaggtagatcgctagtaccaaactggaaattggtccatgcgattttgttaagttgataaagtatgttgcaggataatagtattttatgatcccagttttatttttaaaaatccatgtatatacactcagaaatatatatgcctaaatatgcatagaaaagtgtctgaaaaagacacatcgaactgttgaaggtgattacctctgagaaatgaaatagaataacaggaatgtttactctttagtttatatgttgttttaactttttttctttcttttttttgagacggaatctcactctgtcgcccaggccagagtgcaatggcgagatctcagctcactgcaacttccgcctcctggattcaagcaattctcctgcctcagcctccagagtagcagggattacaggcgcgcaccaccatgcctggctacttttttgtatctttagtagagatggggtttcaccatgttggtcaggctagtttcaaactcctgacctcgtgatccacctgcctcggcctcccaaaatgttgggattacaggcatgagccaccgcacccagccattttaactttttatgaatatttattcctctaaaaaagaggaaagtaatgtgtctcttcctttccaattccgtcatttctttttcttatcttattgcattagattagaattttgagagcagttgttactatgaatagtaatagatgacatccttgtcttgctcctgattttattttatttttatttttatttttgagaccatatcttgccctgtcacccaggctggagtgcaatggcaagatcttggttcactgcaaactccacctcccaggttcaagcaattctcctgcctcagcctcccgagtagctgggattacaggcgcaagccaccatgcctggctaatttctttttttttttatctttagtagagatggagtttcattatgttggccaggctggccttgaactcctgaccttatgatcctcccacctcagcctcccaaagtgctgggatcaggtgtgagccgctgtgcccggcttttttttttttttttttttttttttttaagacagagtcttgctctgtcacccaggctggggtgtagtggctcaatctcagctcactgcagcgtctgcctcccgggttccagtgattctcctgcctcagcctctcaagtagctgggattacaggcacactccaccatgcctggctaatttttgtatttttaatagagacggggtttcaccacgttagcgaggctggtctcgaactcctgacctgagatgatcctcccgccttgacctcccaaagtgctgggattacaggcatgagccactgtgcctggctgttgctactgactttaacagttacacctttggccagatgtggtggcttacgcctgtacagtcctactttaaatcactccttcataaaatctcctttaagccttctaggtgagaattaatctcttactccactagttaaataaaactagcagaaagggacagaaagtttattttacctggccaggtatggtggctcatacctgtaatcccagcactttgggaggccgaggtgggtggatcacctgagatcaggagtttgagaccagcctgaccaacatggagaaaccccgtctctactaaaaatacaaaattagccaggcgtcgtggtgcatgcctgtaatcccaggtacttgggaggctgaggcaggagaatcgcttgaacctggcaggtggaggttgcagtgagctgagatcacgccattgcactccagcctgggtaacaagagcgagactctgtctcaaaaaaaaaaaaaaaagaaaagaaaagaaagtctgttctaccctttgcctggtttatgtggtgacatgccaaataaatttgatacatccttttgtactatgtttctccatattaaaacttcaaaaattatatatatatataattgcctcacatattatatatattatatatataaatcaaaattatatatatatcaaaattatatacattatataatatataaaaatcaaaattatatatattatatataatataaatcaaaattatatattatataatatatatcaaaattatatatattatatataatatatataaatcaaaattatatatatatataattgcctcaaaataattgcctcaaattgcctcaaaaagtgacatgtattcaaagaaaaaaataacaagatgtccattccttggctcccttccctccccgttcctgctgctcctcagtcccctgagattgaaccctggctggggctgggtcgcaggacagcccctcagatgaggtcagcaacattgagggacatttcctcaatggaggtgttgtagacagtctcgatatctcaaagagtcctcttgtcttcttctgtcaccatgctaatagccacacccttacggccaaactgtccacctcgaccaattctgtggatatagttttctctgttggtgggaaggtcatagtcgatgagtaaagaaacctgcagcacagcaatgcctctggccagcaggtcagtggtaatcaaaactctgctagagccagaacaaaactccctcattggccaggcacggtgcctcacgcctgtaatcccagcactttgggaggccgaggcgggcagatcacctgaggtcaggagttcgagaccagcctgaccaacatggagaaaccccatctctactaaaagtacaaaattagccaggcgtggtggcgcatgcctgtaatcccagctactcaggaggctgaggcaggagaatcactcgaacctaggaggcggaggttgtagtgagctgagatcacgccattgcactccagcctgggcaacaagagcaaaactccatctcaaaaacaaacaagcaaaaaaacaaaacaaaacaaaaactccctcatgatcacatcttgttcctcttgacctttatctccatgcatggcagagacagtgaaatctcaagcatgcaacttctcgggggagccagtccaccttccttcgggtgttgatgaagacacctgcctgagtgacggtcagggtttcatgcaagtcatacagggtgtcctgcttccactcctctcattccacgttgatgtagaattggcggataccctccaggtcaactcttccttcttgacaagaatctgaatggggtccctcatgaatttcttggtcacctcaagtacatcagaaggcattgtagctgacagcaaacaggatgttgttgttgagcttttggaatatgtcatagatctggtccctgaatccacagcttaacatttcatcagctttgtccagtacaaatatcttgatgtatttgggagacaggtatctccagttaagcatatcacacacagggccaggggtacccccaattatatggggagcttccatctgcagtttctgcacctcagcacacacgtgggtgccccctctacaggcgtgataggaggcacccatgcagtctccgagtgccatgcccaccttctatatctgctgagccaattcccgagtgggtgctagaaccaaagcctgggtggcctttagatctaattcaatctgttgcagaattgatgtggcaaatgtggcagttttccagtcccagactgggcttgagtgatcacatcataacccttgatacaaggtagaatggctcgctgctggacggcaaaggcttctcaaaaccataggcgtagacgccacggagaagggactccaagaggttcatgtcatcaaagctgtctacaatctcattccagttactctctatgacgtctccaggctccatcccattagggccattgtctctggatcaggaatcctgactcgctgacatgatccttagaaacatacatacatatatatatgaatgtttctctctatatatagagaaacatacacacatatatgtatatatacacatatgtatatatatgattcttagaaatacacaaacgtatacatgttacatatatgtaacatataagcatgcatataacatatacacatagttacatatatgtaacatatacacatagttacatatatgtagcagttacatatatgtagcatatacgcatagttacatgtatgtagcatatacgtatgttacatatacatatatgtgtgtatatatacatgcatgatcctcagaaacatagatatgtgtatatatatacagacatccttagaaacatatatatgtgtatatatatactatatatatgtttctaaggatcatgtctgtgtatatatatatacacatatatatgtatatatatttaattttattaatgttatttttttgagactgagtttcgctctatcgcccaggctggagtgaagcgatctcggctcacctcaacctctacctcccgggttcaagcgattctcctgcctcagcctcctgagtagctggaactacaggctcgggctaccacacctgggtaattttttttttttgtatttttagtagagatgggttttgccacactggccaggctgatctcgaacttctggtctcagctgatccgcctgcctcggcctcccaaagtgctgggattacaggcgtgagccgccacgcccggcaagtgctgctttttaaatattccttctatgtccaggctgagtttcactctgttaagagcctttaatttgtttttatggactcacagtgtccatgacacaggtggatgtcatgatgctgagatgaggaaggacgggtctagttggacttgccctcgctgacatatccatgccttggggaaatgcaggtacacacaataactagctataatctcccagagtgagtcgcatgacaggcgggtcgtgattctcctttaaatgggaccttgattcacataacttggatgcccaaaagctcccttctcacaacttgctaattgctttctatcaaatttgcacacataacaatgtacatttgcctataaattatagaggacagttaatttctcaaaacaacactttaacatttgcccttatcataaacagacttttgctctggagatacctttagaagactttttgtccttttcccaatagaagtatttttggagtgtttcttccagtcagcttatttgcagaattgtttaaactgacactaattttactgcagcaattgaaataaatgtttccaggctggacgtggtggctcacgcctgtaatcccagcactttgagaggctgaggtgggcagatcacctgaggtcaggagttcgagaccagcctggccaacgtggtgaaaccccatctctactaaaaatacaaaacttagctgggcatggtgacgggcgcctgtaatctcagcttctcaggaggctgaggcaggagaatcgcttcacccgggaggcagaggatgcagtgaactgagattgtgccattgcactccaggctgggtgacacagtgagagtccgtctcaataaataaatcaataaataaatgtttatgtttccattttgaaaatgtctactggaaaaataaagatctgcaattaaaatgaacagggagattcttggattgtggtaagtaaaatggatgtttatacttattttttttcaagaaacatcatctgaaatgtccattattaaacgtttcctggatggatatagtaagttctgtataagtccttacaaattctgattgatagcacagatgtcctaattctacattttcaatagacaagtgtttattaagatagatctatcaggccgggcgtggtggctcacgcctgtaatcctagcactttgggaggctgaggtaggtggattgcttgagctcaggagttcgagaccagcctgggcaacatggtaaaaccccgtctctactcaaatacaaaaaaaaattagccgggcgtgatagcgcacgcctgtaatcccagctactatggaggctgagacaggagaatcgcttgaacctgggaggcagaggttgcagtgagccgagatcatgccattgcactccagcctgggcgacagagtgagactccatctcaaaaaaaaaaaaaaaaaaaaaagatagatctatcatcctagcagctaactgaagggaaggtgcatagaaccgtaacacatcacttcacatcaaggtaagcacgtaaccgttttctgttcagaaaaatcataatccagggagaaagttttataccttaccacaaagggagtttattgttttttgaaggaccactatagaaataaaatttgatataaatttagtgcataattacatcatatagattttaaatctttctaaatatgagtctgtgagctcaaggtttataggagttagtgctacctatttgtatgaagtcagtgtttataaaagtgtttctgatctctttctgggcaattttatttacttttagagcattcgtttaaaaaataaggaactgatttactcagctaattaaatattaagtagcatgatatcagaccataataaatattttaaaaggtaaaaatgaagggagggtggattcttagaacaaagggatgctaatttattgcatgtttattgactgttattgaacccaagcaatagcacagaccaaagctctatgcctcattttattgtccttatctgaaaatcccagaaatgtaaaactggacaagactttctaagacaatttgattcatctctggcaaatcttcatgaggcaaaaacccaaggccttcatgcaattggctcatgttgcctttgaacacttaggggatagagacaatctttcttttttactcattttacttatttaatttaactttattttgagacagggtcttgctctgtcacccaggctggagtgcagtggtgtgatctcggttcactgcagcctccacctcctgggctcaaacgatcctcccatctcagcctcccaatgggtggaaccacaggcccaaaccaccacatctggctaatttctctatttttccgtagagacggggtttccctgtcttgcccaagctgctctccaactcctgggctcaagagattctcccaccttggcaccccaaagtgctgggattacagccttgaacgactgatcccagcctatttttagagatgggggtccagtctgcccaggatacagtgcagtagcatgaccatgattcactgcagcctggacctcctgggctcaagcgatccgcctgcctctgcctcctgggtagctaggactccaggcatgcgccaccacacccagctaattaaaagtttttgtttttgtttgtttttttgagacagactctggctttgttacctaggctggagtgcagtggcatgatcttgactcactgcaacctccgcctcccggcttcaagcgattctcatgcctcagtcccgaaagtagctgggattacaggcacacaccaccatgcccggctaatttttgtgtttttagtagagatggcatttcgccatgttgaccaggccggtctcgaaatcctgacctcaagtgatccacctgtctgagcctcccaaagtgttgggattgcaggcgtgagtccccgcgcccggctgtttttcttttctttttttgtttttagagatgagatcttgctttgttgccctggctggtctggatctccagggcttgagcaatcctcccatctcatcctccccagtagctgggactacaggcatgtgccaccacacttagctaatttttaaaatttttttgtagagatgaggtttcactatgttgcacctgctggtctccaactccttggctcaggtgatccacggcccccctcccaacctccccatccctgccttggcctcccaaattgctgggattacaggggttagcaacctgtgcctggcagagataacctttcttgaacaaaggaaacttgttttggtatcaagcaacagtaatgtttacatgagttacctataagtccccacgaaactaagatactttacacaggctgcacctcctctgtaattctcacaaaagccgggttagttattaggtgtcttttattgagaaactgaggccaaagagaggtatggtaatttgccccaggtcgcgcttctggcaagtgcggggtccaggatttacacctaagttgtctctttcgttaactctgctgcttctcaaatgcagtatatatatatatatttacctacataaagtgacgcaataaaatcagtacacataagcttaagcctgtttcaagaaaaaagcttccttggacaatacaaatgaatgataagataatctcatttaaacctgttattaaaataatagcccatattgaattattcagaaccccaaatctcgctttttaaaaatcaagggtcggctgagcacggtggctcacgcctgtaatcccagcactttgggaggcagaggcgggcggatcacgaggtcaagggatcgagaccatccgggccaacatgatgaaaccccgtctctactaaaaataccaaaaaaattagccgggcgtggtggtgggcgcctgtggtcccagctactcgggaggctgaggcaggagaatggcgtgaacccgggaggcggagcctgcagtgagtggagattgcaccactgcactccagcctgggcgacagagcgagactccatctcaaaaacaaaaacaaaaacaaaaaacaaaaattagctgggcgtggtggcaagtgcctgtactcccagctactcgggaggctgatgcagagaatcgcttgaactcgggaggcggaggttgcagtgagccgagatcgcgccactgcactccagcctgggcgacacagcgagactccgtctcaaaaaaaaaaaaaaaaaaaaaaggaaaagaaaagaaaaatcataggtatctgtgtggaataaattaactacaaatccccaagacgactcttgtcatcaatatttcaatccataatttagcaaacacacacagacatcccttatagggatacagttccaggcctttctttgggcatccgtttcgagacctggagagactctgatgtctgtgtgtgactaaggagaagaatagctgaatcatatccaaaagcgagtcctcccaattaagaatctataatacaaatcaagacaatgacagcattccatctgccttttaacctcaacagctcctcctcccaagccagccagcctactcccctccctcattcccccccaaactgggaaatcatctcggaggccggaggcagaaaggggcggtaggtggccgggccccgctgcctctcgcgcctcccggggcccgccacacacggtgccaacgggacgccgcggtcggccgcatgagcgcaaaagcagggcagcgaggtgagcagagccagagttcagaaggggccgcaagtcagacgaggggctgggaaaaaagagcctctcccaaggttaacagaagcgtgcggagcgtgagaagcagcacctcgcacgcagactcgcccgccggccgggtggcaccgctcagccgcccgcccgctagaaggcagcgcggccccggcccggcccagcccggcgcatgcgccgcagcccctcctccgctcccggcgcccgcccctccctcttcctggcgggtctggggcggcggcggcggcggcggcggcggcgcggtgacgtcagggcgttggggcagctcctgtgacagacggagctggagcggcggggcggcggcggagtccggcggccgggagagcgagtgagcgagcggaggagcagcgacacgggagtctagggagcgagaaggagaaggaggggagcgctcgggcgcgagcgagagaaaccgcgagcgccgagcttggactcgagccccggaacggctgaggagcccgcccgctcccctcccctccccctccccgggcccgggcccagcgcgccatcctcccccctccttccctccctccctccttcctccctcccctctccctccccctcccccgccggtggatgggagtgaaggacggaagaggccctgcggaggcggcggtgcagcgctccggtaaggcggcgcgggtctgcgccctcccctctgtctcctccaccgcgcccgggcggctgcaggccggacccggcggcctgacgatgtggctgcgccggtcccctccctcccattctcccctccccctgcctccgccgccgcctcctccttcttcttctctcctcgctctcaaaatggcggccgcgacggccgttgagtgagagacccggaggagggggactgtccggggagggcgctgccctcgctcctctcctcccgggcccggctttgggggctgccggcgcctctgcgacccccgccccgcggccctccccaagaagggatcgccctcctccctcggtgacttagcaagaaaagtattcttgggttggaagggcgtggggaccaggtagctctctgatcttggggaaaaggatcggccctgctctccccggccgcggagacgagcaccgcagtccccaccccaccctcagttatcggctcggggaccggctcagccccgcgccgccggggcactcatagggccttccaggcattccgtccccgactggtccttaagatggggttgaccagcggagggtggcccaccgtctccctggcccccggtgcggcggtccagcctcagcacccgccgaggagaggcagcccggcccaccgagcaatccgcagcatccacccaccgaatctggcaggattttctttctgccaccggctcctcggtcgggagttgccttttgatgctgttaacattcagcttcgaggctccctgccattccccttcgtctaatctcatctccctgcccctttgggaaacgcagtgcctctgcatatttaccctctttagcctcccacatgagaaaatgcctttgaggtggtcgacacattttgactctgcacctctaaacgtagcagtagaggggaagaggttttccgtatttagtaggagagagcaaggtaccatagctttatatgttatgctacctttcttcagtgacttagcaagaaactccttgggaagagggcaggaaattttcttttggggtttgggcccaatttatatcagtcttttggttaagaaaatacgcctttgaagaggaggaccagatttgtggtctcgttctcaatgggcgatgtcatgccaaggtcccccctccctctttccttaagtggcagtccggacaaatagagatattactgatattcccatctctcctttaagcacacagtcttggagtttcataaggttttaaaggccaaacaaacaatttgtgccatttttggcaattctgtttttgttgggggggtgggttattttgtgtgaatttcttttcgaggctagggcggaggagacagtgcttgggcctttcataccagtgataatgtcatccctccctttttgccacaggagtgtttgcttttttttttttttttgctgcagcagggcggcttaattgctgcggggtccagtctcataatcaggaaaatttcctgttgactgtgtcatagtgatgttgaatatatagtaaaagcttttacttaaaaaattctgatttggttttaaggcattagctagcttttaatctctaatgggtgtcttttaggacacagtttcacaaaataattagcagttgcaaattgcagtttttaataaagcagaagagtaatctgtatttagggtgatttctttcgtgttcattaatgatcattgtttggattgctcagaaggggggaatctcctaaaagaaattgaaggctggtatatattttaaaatcagaaaggaatccaatttttcacttgaagtatttctgtatatgttgattttgatggagcaagccctacgttggtacctccccccacatccttttttaaaaaaatgggctaatatttgtggatgctgtgaacagccattgagccgagaagactgggtggagtaagggagcagaagctgtgaaatgctgtattgccctttcacagcgtctttctcttgcttatgttttgtaaggttatttgatatgaatggttgctacaactaagtcatttctctgtcgtaagtcttaaaatctaatgttttccaccttttttgcatgatgggcattgaatgattggaataaaaagcaatgtccctgctttaaaatagacacttattgtctccttatttgtccctgtgtgtgtgtgtgtatatattaatatataaagatacacacacacatatatctacactcttgttaatgttttttattgttctcgccatataagtataaattaatgtcagaaatatttggcaagaaatagggggtacaggaatactgcaataatctaagaaaaatactacaattgttttacttaaaacagtaaatctatttgagattttaaaatagtgaacataaaaggtggggaaaaaaggataagataatttgcatgaaagccccttcagatcttttctcttgtgttgctctttgaaagggacctttttgtgagatactgccataagctagggtaggtcattttaatgccctgtatcaagcattcacatgagtagacatcttcaaaagaatttcacatataggtggtaaatgtgactttgattagccttatgaatgcttgtcagtgtatgatgtatttttacacttttgttctttttaatatgattagaaagtagaagggttattatggtgaggaaatgagtaaggttgggaatgataattcactgtattatgtgtctgacatatccctattcctactgtttgtagaatatcaaagcacactaaggtccaggtgcagtggttcacgcctgtaatctcagcactttgggaggccgaggcaggtggatcacctgaggtcaggagttcgagaccagactgaccaatatggtgaaaccccgtctctactaaaaatacaaaaaaattagccatgtcttgtgccatgcgcctgtaatcccagctgctggggaggctgagacaggagaatagattgaacccgggaggcggaggttgcagtgagccgagatcgtgccactgtactccagcctgggcgacagagcaagactctgtcaaaaacaaacaaacaaaaccccacacactgagtggtgatttttcagtagattgttgttaatcaggagcttaagataatttgacttaaggagctttagttccaagtgtatgtagtgtttcttgatacatgttggagaatcttaggcttaatttggagattaatttttaaaattattcatagttctgtatagaactcttaatgagattggaaggaattttttagtacaattttttgttacctgtttttccagataaaatatctctagtgtaaagagattttgagatgtttctgggaaggaaaagtcagaatcataatttatgcttttctagctagaacatccgtgtctttttttttttttttttttttttttgaggggaagtcttgctctgttgcccaggctagagtgcagtggggtgatctcagctcactgcaacctctgccttctgggttcaagcgattctcctgtctcagcctcttgagtagttgggattacaggtgcctgccactacacctggctaatttttgtatttttagtagagatggagtttcaccatgttggtcaggttggtctggaactcctgacctcgtgatccgcccgcctctgcctctcaaagttctggaattacagatgtgagccaccacacccttccctattttctattttttaaaaataatataaatgtttctctctcagttgtatactaagtaacagagagacagaaagtgtgtgtgtgtgtgtgtctgtctgtctgtctgcgtatatgagactttatggcttatattttaagtatccagcaaaaataagaccctcttgtttacatgtggttcatgttattcataatttgtcatctttgtgaataagtcatggatgctatagaaattgtcaacattaagatgaagatgtctggccagacatggtggctcacacttacactcccagaactttgggaggccgaggcgggtggatcacctgaggtcaggagttcaagaccagcatggccaacatggtgaaaccccgtctctactaaaaatacaaaaaaattagccgggcatggtggcgcacacctgtagttccagctactggggagactaaggcaggagaattgcttgaacccgggaggtggaggttgcaatgagccgagatcgcaccattacgctccagcctgggcaacaagagcgaaactccatctcaaaaaataaataaataaataaaaataagatgaagatgtcttaaaaaacccaaagcaaaatattagggcagagtgaattttcaatatcttcccattgagttctaaagcagtgagtcatgcgctcttttgccaaagggacttgaggctcggttggttttaaaccaagctggccatttctgcttgtggtcctaaaatattttttacttgcctctaagtccctgttaacgaaaatatttcattatgacaggtaacttatttttatgtgctttggaaagagggaaatagttaagttttgaagtggaaattctttgccactgtttttattatgtcatctacagtacaactattactttttttttttttttacttagaaagttgttctatttaaaataaaactagtggtatacaatacgagttctgaaaaaaagacagacctaccgttctccagaagatgcttagctgtaaattgaatcctcgtcattgaaggtcaaacattttgagaaatctgtatttcatgaagaaagatgctgtattatgtaagcgtaatagttaactgcagtgaaggctttttggattgttctttgttgctggtttggcatggcactttttggctagtcattgaaatggaaccttagtttaacttctgttacatatgtaatttttaaccttggcatggcagtcatagaatttaattgatatttatgaaatgctttatattcattggtggcaggcatcataagcacttattattttatttcttgttttctttttaaaagatggtggcttcttgttgaaacttacctagataggactaatctgcatttgtcaaggatacttctggaatggtactctctattgtcttttaacattgtcataaacgtttctctagaactttctaaatattgagcttggtactgattttcatttgttcttctgccagctactttttgaggtagattggtatttttatggatgagagaactgaaatccagagaatttcttttcctgtcgaatgttaggttagtgactagaataaggtaaatattgcagtcacagaactcttgggtactgctttgtaaaatcacacattccttctttctataacgattggactccttaatctttgttaaatggtgaaagttggtggtatttattgcctgcatcatttaaattggcatttattaacatatggtcttgtattgttgactgctttgcatgcataaggcttttggcatttgagtagcttctcccaaaaaatgcctaatactgctttacagatagtattaataagtgaataagtactagttgcatttgactgaatggttatgtgaaaggaaatgtgctatcctaaagatctttgtaatagttgactccggtgatctcaagagaattaaggtgatggaggaaagagtggctgcatttcgtatacagagattttatattctctgagggaacagggttacactttgacagaattcttaagtataaaaagtgaattaactcaactggacaaattacctatacattttgattatctgcttttggggctcttatgttgacaagaattgacagttaactgaggccattaaaaaattttctgagactttttacaaaagtaaaattaagaatctttgaacattttaataaatttaatttttgaaagcattgtagaaagttatatgtttattaaaattttacagtgcagattaatccatttttaacctttttttttttttttttttttttttgaggtaagagtctcactccatcacccaggctggagtgcagtgtctcgatctcagctcactgcaacctccacctcctgggttcaaacgattcttctgcctcagtctcccgagtagctgggaccacaggcacataccaccacagacagctaatttttgtatttttactaaagaactcctggcctcaagtgatccacccgagttggcctcccaaagtgctgggattacaggtgtgagccaccacacccagcccaatccatttttaatctaaggtaaagatagaagagtttgttttatgggttgggcactgtggttcatgcctgtaatcccaggactttgggaggccaaggcgggcagaaggtgatcaggagttccagaccagcctggccaatgtggtgaaaccctgtctctactaaaaatacaaaaattagccaggtgtggtggtgggtgcctgtaatcccagctacttgggaggctgagacaggagaattgcttgaacccgggaggcggaggttgcagtgagccgagatcgtgccattgcgctccagcctgggcaacaagagtgaaactatctcaaaaaaaaaaaaaaaaaaccaaaaaaagaaagaatatgttctatgatatactagtgttttatctatttcttttcatatttttattttataaaaaatatgctaactacaaaagaaagaagatggagataaatgagtcagatgttttgattatttagtattttggttaagtttttctttttgagacggactctcgctgtgttgcccagactgtagtacagtggcgcgatctcggctcactgcaacctccgcctcctgggttcaagcgattctcctgctttagcctccctagtaatagctggaattacaggcatgtgccaccacacctggctaattttttatttttagtagagatggggtttcgccatattggccaggctgatctcgaactcctgacctcaggtgatctacccacttcagtgtctgaaagtgctaggattataggcatgagctatcatgcctggccttggttaactttttatgggtgaggaaaggctatacatttagcattgtcagagaaaatgaaataagctgttgactaaactcatacatgaatatttatttattatttatttatttatttttcaagactgagtctcgttcttgtcgcccaggctggagtgcagtgttgcgatcttggctcactgcagcctccgccttttgggttcaagtgattttcctgcctcagccttctgaatagctgggattacaggcatctgttaccctgcccagtgaagttttttgtatttttaatagagatggggggtctctgttggccaggctggtctcgaactcctgacctcgtgatctgcccaccttggcctcccaaagtgctaggagtacaggcatgagccaccgtgcccagccacacctggctaatttttgttttttgagatggagtctcccaatcttgttgcccaggctggagtgcaatggcatgatcttggcttacttcaacctctgcctcctggattcaagcaattctcctgcctcagcctcccgagtagctgagattacaggtgcctgccggcatacctggctcatatttctatttttaggagagatggagtatcaccatgttggtcaggcaggccttgaactcctgacctcaggtgatcctcctgcctcggccccgcaaagtgctgggattacaggcatgcaccacggcgcccggcctaatttttctattttctgtaagaggtgaggtcttgccatgttgcccaggccagtctcaaactcctagcctaagcaaactgcctcaagccatctgctcacctttacctcccaatgtgctgggattacaggcatgagccactgctctcagcctaagaaaaaatatttttaaagttgacaaatgtagaaatgagctaagatttgtcaaagggatcaataagtaatgaaatattctggttatcaaagtttatcatatatgaatgaacagtgaaaaaattggaaataacagaattaacaaattttaatttgtctttaatggttcagcagtcacttaaaaatttttacagtattaccatgatgctatagtctttatcatcacaaatcccaacgtaaagataaaaaaaaaccccacttaataaaatcattattcaagctttctggctcttcgacttgggctaaataagtgttctgtataatggtatgtccttaaagagaaattatctccacctactgaaaaaaaaaacaaaacagcgagggcctatcaatttgagagtttaaacaggcctgtggttcgcatttttatggaagcatcataatacaaccccaagacatcaaatgtcactagcacagaagacatctaggatccaaagttcttagaagaatattacttttaaaaacattagaaataatactttacgtgggactcaaccttgactcttctttcttcctctatatccaatcaattaccttgtcttgccaattttacctcctcgatatttgttgagttagtccccttctatccatacttaccattactactactaccatcatagttcacataatctcttacccaactaatttcacatcgtctctctaaattcagtcttgtccggttaacgtctttctgctacatagtccccagtcatctatctaaaatgcaatctgaccatatcacacttccctacttaaaaagaaccctcccttggctccctttgtatttatttaacaaatatttacatagcacttactaatacgccaggctctgttttaagtgctttacaagtattcgtttactcctcacaacattctgggagaatttagctagccctttgtgacagctttgtaagtagcagagctgaaagttgaacctcaggtactgaggctccacagttggggctttcagccaccgtactgtgctgactccctctttcctatagtccacatactttaacacagtttgctaggtcttcagtcacttcaagtttcatttctaatcaagccccaccttgctcacactctaatatatatatgctttctccctccccactttgtgatctttgtgattctactcctgctgtcctctctgtctagagcaacttgtagtatctcagaacagagtgcagtgaatacattttgacaaaagaatgatttttttttttgagacagggtctggctctgttgcccaggctggagtgcagtggctaactacaactctgcaaatcctgggctcaagcagtcttcttgcctcagcctcctgagtagctgggtctacaggcccgcgccaccatgcctgggtaatttttgtatttttcaaaatacaggccaggcgcggtggctcacgcctgtaatcccagcacttggggaggccgaggcaggtggatcacctgaggtcaggagttcgagaccagcctggctaacatggtgaaaccccgtctctactaaaaataaaaaaattagctgagcgtggtggtagatgcctgtaatcccagctacttgggaggctgaggcaggagaattgcttgaacccaggaggcagaagttgcagtgagttgagattgcaccactgtactccagcctgggcaaaaagagcaaaacttttgtctcaaggaaaaaaaaaagtatgtatatatgtatacacacacacatttttgtttttattcaatttcataagaagggggaaaatcttgattgacattgggtaatttgaaattttctccagattcttttttttttttttctggacacggagtctctctctgtcgcctagactggagtgcagtggcacgatcttggcttactgcagcctccacctcccaggttcgagtgcttctgcctcagcctcctgagtagctgggattacaggcatgcgcaaccacgcgcggctaatttttgtatttttagtagagatggggtttcaccatgttggtcagactggtctcaaactcctgaccccgtgatcctcccaccttggcctcccaaagtgctgggattacaggcgtgagccatcgcgcctggccagattatttttattttcttttttgagacggagttgaggtcttgtcgcccaggagtgcaatggcgtgatcttggctcactgcaacctccacctcccaggttcaagagattttcctgcctcagcctcccgagtagctgggattacaagtgtgtgccaccacacccggctaatttttgtatttttagtagagatggagtttcaccacattggccaggctggtctccaacccctcacctcaagtgatccccccgcctcggcctcccaaagtgctgaggttacaggtgtgagccaccgcaccctgctgagattcttaataaaatgattaaatggataggaaaatcagtgtacttggtattttaaagctgtcctgagttgttatggtataccttgtatgtgacctgtgtcatttaggctatttcagggcccatcaaatctacacactaaagacagccaagagatgatacttgaactgaatcttgaagaatgaataattgggccaggcgtggtggcttacacctgcaatcccagcacttcgagaggctgaggtgggtggatcacttgacgtcaggagttcgagaccagcctggctaacatggtgaagccctatctctactaaaaatacacaaattagccgggcctggtggtgcatgcctgtaatcccagctactcgggagactgaggctggagaatcacttgacccaggaggagtattggagtgagccgagatggcggccactgcactccagactgctgagcgacagcaagactctgtctcaaaaaaaaaataattggagtgaacgtgggaggtcattttaggtggagggaacagcaacataaatagtcacagaagcatgagaaactattttatgtatgctggtaatagtttggcagaggggattgtagaatttgaggttggagaggcacgtctgagccagattgatagaatttgtatattgtgtagcttgtaggcaagttggaagtcattaaacaatttcaggtaaaaacaagcattatgagatgatgtatattttggagagattatgcaggtggcaataatgaatgtggattttggaggtcatgtagacttcttcagaaaataatgattagtgcttgaagcaagacagtgacattaaatgttgttgagtggagaaaggtttaggaggtccggttgtgaatgagtagtgtgatggggagaggcaagttgaaacaattcagatttgtagtttgggtgactgagtggaactgagaaacgaggtgttattagccatagcagagaataagaggaggagttgtatagaatattacataaagcagccagataaatgttcctgaaccacaattttcaagtcactttgttgccaaaaacccatcatcagctttttactgtctttaatgaaaatgcaaagaacacaatggcaaaactatggtactgaataggtgtttattgaatcctaaatgggcactcaaagacttctcttacatgtcctggcttttcatcctgtttcttattgccttccatgtctactgtgattcagctttgggaagatattttctgttccttttgctgctttgactccctgccgcgccccccttacttacgcttcaaatctgcctaccaggttttccatttccaggcagtcttttctaattttttccacctggaagaaactttcttttctctgagttcgtaatcttataataagtacctatttttctcttcttctagcgtatataaaatgtattatctgacgtgtcaagtgagttaatgcatttaaagagcctaggaatggtacctagaacatagtaagtactcaataaatattgttattatggtgatgattgatgatgattaagatgaggtgacctttgctttctgctttcttgtgatggcaaaaatgatttgttgtctgtctttggacactagggaagcaaagtcttttactttgcttatgtatataaaagtacaaaagtgaaattattcttgagctgtaggtgagagatatacaaagctagacaagcccttaaatattgacgattttgttaagcttcaccacagctgtttgaggtaggcggtatattagtccctttttaaaaatgggtaaataggcttaggaaatttgtagatttccccaaggtcacacagtttgtaaggagccagattgatatatgaatcttaactattcgactccaaaattcttcacaggagggcttcatgtgtgtaggacttacccttcagggctttcatttcatttatgtatccaacttgttacctgtcagaaagcctatcatgagacctatgcccaatggaaaaaaagtgctttttgagttttctttaatttttttttttggagacgaagtttcactcttgtcgcccaggctggagtgcaatgacgctatcttagctcactgcaacctctgcttcctgggttcaagcagttctgcctcagcatcctgagtagctggaattatgggtgcctgccaccaagccaagctaatttttgtatttttagtagagatggggtttcaccacgttggccaggctggtcttgagctcctgacttcaggcccgccttggcctcccaaaatgctgggattacaggtgagccaccatgcctggctaaaattttattttgtgtatttacagtttaatttgttttctatttttattagggaatatgttaaatgttaaaagtacctgcagtagtaaaacagaatagccatataagtattaccagaattgacagatgttaacattttgtcatatttgcctcagagctttttttttttttttttttttttttttaagacggagtctcgctctgtcgcccaggctgggctggagtgcagtggcgcaatctcagctcactgcaacctctgcctcccaggttcacaccattctcctgcctcagcctccctagtagctgggactacaggtgcccgccaccacgcctggctaactttttgtatttttagtagagatggggtttcaccatgttagctaggatggtctcgatttcctgacattgtgatccacccgcctcggcctcctgcggtgctgggattacaggcttgagccaccacgcttggcctagagcttttttaaagaaggcattattacagttatagttgatatctttttgtattttgttttttattttgagacagagtcttgctctgtcaccagagtggagtgcagtggtgtaatatccgctcactgcaacctcggcctccagggttcaagagattcccctccctcagcctcctgagtagctgggactacaggcgtgcaccagcgtgcccggctgatttttttttgtattttagtagagatggggtttcaccatgttggccagggtggtctccatctcctgacctcatgatctgtctgcctgggcctcccaaagcgctgggattacaggtgtgagccaccacgcctggccttttcttttctttttcttttttttttttgagatggagtcccgctctatcacccaggccagagtgcagcagcaccatctcggctcactgcagcctccacctcccaggttcaagcgattgtctgcctcagccacccgagtagttgggatcacaggcatgtaccaccacacctagctaatttttgtacttttagtagagacagggtttcaccatgttggggccaggctggtctcaaactctgggcctcaagtgatccacctgcctcagcctcccaaagttctgggattacaggtgtgaatcaccgcacccggcttgatgtcccttttgtacttctttccaattgtgtccaccttcctcttctcagtagtaaagtttctcctaaatgttgtatatagcccttcgttccatatttttatgcatttactatatttgggtgtatctataaacaatatatagtagtgctttatagattgttagaatttacgtgaatattctactgtatatctatattaatctacttggttttctttcctgttttttagatgcattattgatatatgtagatctagtttatttagttgtataatttcttatatatgataccatattttctttttcttttttttttgtgagacaaagtctcactctgttgtccaagctggagtgcaatggcacaatatcagctcactgcaacctccacctcccaggttcaagcgattgtcctccctcagcctcctgagtagctgggactacagacacgcaccaccatgctcggctaatttttgtatttttagtagagatgggggttgcactatgttggccaggctggtctcgaactcctgacctcgtgatccactggcctcagcctctcaaagtgctgggattacaggcgtgagccatcacacctggcccttttaccatattttctttatgtttagactacagaaatgggcaattaggttgtttacagctttttactattacagacaatgctgcagtgaacataaggaaggtgtttgctagtgagatgatatgatgtgtttacttgggctgggtgtggtggctcacaactgtaatctcaacactttgggaggccaaagcaggggattgcttgaggccaggaatttggcaccagcctgggcaacatagtgagaccctgtctctacaaaaaacaaattaaccggatgtggtggcatgtgcctgtggtccctagaagtttgaggtcgctgtgagctgtgcttgtgcctctgcactccaacctggacaaccgggtgcgacctcatctctaaaaataaaaaatgatttgtttgtttttgcactgcagaattcacccttaggttaattaaataaaatatttgttctttggtaatatttatgcttcgagctgaataaagagaatggataatattattgcatcaattttagaccataatttcctaaacttcattctgttttcttccgtctcttcaaccattcaaacatatttattcattatctagccaggggttgaatactggcagccttgtatttctctttgcattgatggttaacatttttttgagccaacatttaaaaactagctgttttacataaagtctctattttctggttatcctgaaaaattaggagctctgtcaacaggcagcccacattttcccatgacagcagttaacctaagctgaattacagctgccttcttgaatttttttttccccctgctggagatggggtctcactctggtgctggggctggtctcagactcctgggctcaagtgatccccctgcctcggcctgccaaagttgtgggattgcagggatgagccaccgcgcccggctcccgctgcctgcctttagatgagcatacgctctccagtggaacaagttgctggtcctccttgttggtgtttattatcgcccttgtattgttcatggtggacagatacttctctattgatgatgtttctttcaaaaatgaaaaaaagtatagcttgacagctgtagttttcaagaaaagtagaaaagagcatatttttctggaaatgaagatttttttttttgagacggagtctcactctgttgcccaggctggagtgcagtggcgctgtctcggctcctgcaacctctgcctcccaggttcaagcgattctcctgtctcagcctcccgagtagctgggattagaggcgcccgccaccaggcccagctaatttttgtatttttagtggagacggggttttaccatgttggccaggctggtctcgaactcctgacctcgtgatccacccgcctaggcctcccaaagtgctgggattacaggcatgagccaccgcgcccggctgaaacgaagaatattttaatatatatatattttaagacagagtcctgctctgtcgcccatgctagagtgcagtggcacgatctcggctcactgtagcctttgcctcctgggttcaaacaattcttgtgcctcagcctcccaagtcgctgggattacgggcgtgtgctaccatgccctgctaatttttgtatttttagtagaggcagggtttcgccatgttggccatctggtcttgaactcctggcctcaaattatttgcccacctcagcttcccaaagtggtcagattactggcgtgagccactgtggctggccagtaattttgtttttaattgaactttgaaaacgcagttctatcattggtgttctatttctagccgactcagactttcacctggcaagttggtctctgtatttgatttgtaactccttatttaaagcaatttatgaggatgcataaaactacaaaatgcctcagataaaagtaaggagaaagaagaaacaaaaacaaaagataaagataaagtcaagtcaggatgtaggccaaaaaggtttattataattttcttcctacaggcagagcacagatttgactctgagctttctaggaaccagcaggagagaaaaacttggtagtttatttttttacagtgtccttaagatacaaaataactagatagttcagaaagataactaaccacttggcactatcaggctagagcagaagtgtccaatattttgacttccctgggccacattggaagaaaaagaattgtcttgggctacacataaaatacactaacgatagttgatgagcttaaaaaaagtcacaaaaaaaatgtcagtgttttaggaaagcttacgaatttgtgttgggccacattcaaagctgtcctgggccgtgggtagcacaagcttgggctagagtttctcatggggctctcataaagaggattatgttgtaattattattatcctcttcaacatctttaaggtagatggatgacaagtatttaagtagtcttagtgtgggagaccaatcacatcacatgagtcagtctgaaagagtggatagatttgtctttcagtgtctgatgagtggatgagtttccctcaacccagctttttaacctccttggcaggtacctccatacatcaagtacagaccattcatatgtaggatttaaattaccctgtgaaaatctaattttacccagaatagaatttgtgggagtgactgtacattaaaattcttgttagaaaataatttcaaatcttcttcatccttgtctgtcttcttctctgtaatttgaaggtgggtagagaatattcttccagaatatccaaaagtggtaaaaacattaagaaatatagaaaagggccaggcgcggtgactcatgcctataatctcagcactttgggagactgaggcaggcggatcatgaggtcaggagttcgagaccagcctgaccaatatggtgaaaccctatctctactaaaaatacaaaaattaaccgagcatggttgtgtgcgcctgtagtcccagctactcaggaggctgaggcaggagaatcgcttgaacctgggaggcagaggttgcagtgaaccgagatcacgccattgcactccagcctgggtgacagagcaagactccgtctcggggcaaaaaaaaaaaataaaaaaagaaagaaatacagaaaaggggtccaggacacagctgtgttttatattgctagaatttgcttcagcagaagacccgtgaatcaggactcatgctggttttcagcatagattaaatgtaaggagaggtttggtttttgtttgttttgagtcggagtctcgcttactttttcttttgaattttaaaaaagaagagtgagagtacgtctttactctctcagaacacagtaagttttgatcttagtttttactaggatgcctacagtagttgtttagaaacactaattaccatgagtttggtcgggacacaatgaacagtgtgtcaagggttgaggcaacatcagggcagataattacagtgtattgtgagaagtggtaaatacgtgtatgtatgaagtactatgaagtcacagaagaggtggttactctgtgttcgcttaattgtttggggtcaaaactagtgagaatggtaactaaacccgcaagttctgctgtttatgctagctgctgagaggcttgctaatgatgtttaaatatcattgatagctattaggttgaaccattattggcagtttttaatggtttaaccctagtagtatcttggtgtgacgatttaaaaggtattttattttttgccaatactgtttgacggttgttgaataattgatattttgttaaagctttgaatattgaataaatgtgccattttgggaaaatggcacttttttttttttttttgagactgagtctcatcgcccaggctggagtgcagtggcatgatctccactcactgcaacctccgcctcgtgggttcgagtgattctcctgcctcagtctcccaagtagctaggactacaggcgcgcaccaccacgcctggctaattttttgtattttttttagtagagacgaggttttgccatgttggccaggctggtctcaaactaccgacctcaggtgatctgcccgcctcagcctcccaaagtgctgggattaaaggtgtgagccaccatgcccggccgtatcttcccgacaatcttgtgaaatagatactactattaaaagtagctgtatcagataatttctagatgtaagagggttcgccaactatagctagcaagtcaaatcctgctgtttttattttgagaaggggactctgtcccccaagctggagtccagtggcctgaacacggcttctctgtagccttgacttcctaggctcaagcaatcctcctgccccagcctcctacgtagctgggatcacaagatgcgcaccactacgcctggctgtttttgattttttgtagaggtggggatctcacttttttgcccaggctggtctcagactcctgggctcaagtgatcctcctgcctcggcctccacaagtgctgagattactggtgtgagccagcatgcccggcctgccacctgattttgtaccataagcctaaaaatgtttgttgtttgttttttcaatttttagtggtcgaaaaatcaaaataaaatgttttgtaaaataattttataaaatccatttgataaattaataatttgtaaaaaaaaaaaaaaaaaaggtgaaattcaaattttagtgtccataaagttttgttggaacaaaaccatatctttttctttctttttttttcacattttcctttaaaattttgtttttgtttttgtttgcatccaaaactgaaagaaagaatgcaagctgtgggaggcaggccattgcatcaagtggtggctcctgggagtttgtgtggccccaccccccacccacccctggccacttcagcacagaggctgggaagggtctgggggccctggaagcagagccaaggtcccattttcttgcttgggcgaagctcagccggcagggccgtggcccccttcatagggggaggtggctgtcatgggggacaagggctgctgctctcctgtgctgagttccctctctggggcccgcagtgttggtggctgcagcggcagagccatggggaagctggccatgtagaagatgtggcccaggcgcctggccacctgggcctgggtcttgagggcaggccccagcttcaaccccgtggtggtcagcgggtgctcccccgtcagcagtggcagggtctccccttcgatcccctgctccctgaagacctgagtatactctccacagccagacagccgcccctccgcgaagctgcagacatcatccatggtccacttgctgacgtcctcaagggctggggcctcctccccatccacagagagtccccctgtggcgctgggccaggttctgcttctgcaggagctcctgatgccgggcgagcatctccactcgggcaggggcaggaatccgtagcctgggatctggcacagaggtgagggcactcccagaaaggggggcctgaaatgggggcccagggtgatgtgaggggcattctggggcgacagcaagagggggcggctgtggcagctccttgtcaacagtagcgcaatgagcggcctctttatatattatatattgtttatatattgggtttttttttttttttttttttgagacgtgggtctggctctgtcgcccagggtggagtgcagtgatgtgatcacagttcactgctgcagcctcaacctcccaggctcaagctatcctcccaccttagcctcctgagtagctgggaccgcaggtgtgtgccaccattcctggctaatttttaaatttgtggtagaatgaggtcttgctgttttgcccaggctgatctcaaactcctgagctcaagggatcctcatgcctcagcctcccaaagtgctggattagtgagccgtggcacttacctagccagtatattgtttattgttgctttcttactgcagtggcagaagagttgctacagaatctgaatggcccacaaaacctaaaatacttactatctttgcagagtttgctgacccctggtctagatacaaaggggagagaacataagatagaaagcagcaaacttaatatagatgcaaagaatgtgtctgtattacaacatcccaggaagactagatagttatataatgaacaaggcaactgtgttttcttcttgaaggatttttaaagacgacttttataaaagctctgttgcctaggcgggagtgcagtggtgtcatcatggctcaccaaagccttgaactcctgggctcaagtgatcctcccaccttagcctcctgagtagctaggactacaggcacatgccaccatgcatggctagattttataattttttcttttctttttttttagagatgagtcttgctgcgttgcccaggccggtgttaaacttctggcctcaagcaatcctcccacctcagcctccaaaggggcaaagattatagtgcaccaccattgcaggccaacattaaagtaaatttaaaggaaaaaagtgacccacaatcttgaaaatcatacgaaaacagtcaatgtttgtcctcacattccttcccactatttgtggcatatgcagttggccgtccatatccatgggttttgtactgtggattcaaccaactccagattgaaactattcagacaaaatgatagttgtgtcagtactgaacatgcagttttcctgtcattattccctgaacaatacaatataacaactatttacatagcttttatttttttaggtattctaagtaatctagagatgatttaaagtatatgagagtatatgtgtaggttatatgcaaatactaagccattttatataagggattcgagcattgttttattggtatccggggggtcctggaatgactgtacatgtgtataatatacaacaactgatatcagatagaaagtacaaggaaaaagcgatttatgacaaaatctaaagtcataattcagtttctttagaacctttaggtgttcaaaatggcttcatttcgaagacaaaagtaggaaactttctttctttcttttttttgagatggagtctcactgtgtcgcccagcctggagtgcagtggcacaatcttggctcactgcaacctctgccgcccgggttcaagcgattctcctgccttagcctcccgagtagctgagactgcaggggcctgccaccgcgcctggctaatttttctatttttagtagagacagggtttcaccatcttggccaggctggtcttgaactcctgacctcatgatccccctgccttggcctcccaaaatgctgggattacaggcgtgagccaccgcgcccagcctgaaactttctctttttagaggggcagtgaagaagtagtctttgagcacccatcaacaaatgaacacatctgggatgaagattgtacctaacatgtttgatcagtctggtgtggcaataaggatgcacccaggaggtgataaggaaatccaggaggtgataaggtagacagactgagaaagaagacacaaggagagaaaagtaaagagaggaaagatgagcattaatgagggtgcttacaagcggcagaggcagtgaatacaaaaacttagtggaaagaaagcaacgacgaaacaagaataggatgagttctcagttacctactttattcttcaaatagcccttattcagcacatctttcttgtttgttgtagaatggagagcagtttattacatttgataatccttgaaagcattaatttgcttggagggtacccagggagtagagttcaagcagtatgaagagtgaagaatattcattctggtagagtttagtgacagactaagcttatattaataacggttctatattatagaagaatactactgctggagtatggcagtatattaggtttctccagagaagcaaggccaatagggtgtgtgtgtgtagagattgactggttgattgatgtttgaggaattggctcatgctattgtgaaggcttgcaagttcaaaatctgtagggtaggctgacaggccggggacctggggaagaggtgatgttgcatctcaagtccaaacgcagtcttttggcagaattctatcttacttgggaaatcagtcttttctttttctcttaaggtcttcaactgatagaataaggcccgcccacattataaagataattgactttactctgagtctgctgacttaaatgttaattgtatctgaagaaatatcttcacagcaacatctaaactattgtttgatcaaatatactgggcctagccaagttggaatgtaaaattaaccatcacaagactgtaatagaaaccatctcataatgtacatttgggacttatggtgaaaggcaaagggcagaccgggtgcagtggctcacgcctgtaatcccagcactttgggaggccgaggcgaacagatcacgaggtcaagagatcgagaccatcctggctaacacggtgaaaccccgtctctactaaaaataccaaaaaaaaaaaaaaattagccggacctggtggcgagcgtctgtagtcccagctactcgggaggctgaggcaggagaatggtgtgaacccgggaggcagaggttgcagtgagccgagatcgcaccactgcactccagcctgggcgacagaacgagactccgtctcaaaaaaaaatgattgctcttaataagaaaaaaacagacatccagatatgacttatattgtgttacttaaatctaagtctgattgatttcaaagccccaaaactatttctactttatttcttcagatttaaagctgtggaccaactatttgcagcacttgcctttaatactggagttagtagatttgaggtcagtaggaatgcttctcagtgaaaaaagtggtagcttaatctttggctcaaggctaatcgtaaaataggaaacattttcctatgtaaattttggatgggtaacttaaatcttgcaaaatgaatgaagtatagtggttagctgtaactaatagaaaagcgaggagatggtgaagctgtaaaagaattttacaactttttcagtgaaccatacctgagcacagtccatccctcagtgattttaccatactgataaaccaacctgatctctttttttgtttttattacctgctgacagcagatgctagtgaatcatagatgggcctccaagctgaagcagaataagaagtagacgtgttaaagtctcagtgtttgaggccaggcatggtggctcacgcctgtaatcccagcactttgggaggctgaggcaggcagatcacttgaggtgaggagtttgagaccagcacagacaacatggtgaaaccccctgtctctactaaaaatgcagcatttagccaggtgtggcggtgggtgtctgtaatcccagctactcgggaggctgaggcaggagaattgcttgaacctgggaggtgaaggttgtagggagggagtggagattgcgccattgcactccagcctgggcaacagagcgagactcagtcccgcatcaaaaaacgtctcggtattggattaaaaacttgcatttaggccgggtgcggtggctcacgcctgtaatcccagcactttgggaggccgaggtgggtggatcacgaggtcatgagctcgagagcagcctgcccaacatggtgaaatcttgcctccactaaaaatacaaaaaattagctgggcgtggtggtgggcacctgtaatcccagctattcgggaagctgagtcaggagaatcgcttgaacctgggagatgcgaggttgcagtgagccgagattgcgccactacactccagcctgagcgacagagcaagactctgtctcaaacaaaccaaactttcatttatcatttgtaatagtgtgaatgggaaaagtctaaattctctcatatcttcagttattcatacagagcacacgatacttcaagaacatgaagttaatcttttgataaattttgccaccttttaatcagaaaacaattttaaaactctagaaatttacctctctgggtaagaaaggaaataaaaagattgatctaaggaaatgaagttactcttacggagtattttgtccttctatgtaatctcatggatttagctaaagactggagtctttttcagatacgtgatgcaatgattttataggaaaatttacttttttaaaagaaattatttgactgcattatagtatagtgttaatgatggagttttatttatttatgttatttttttatttattttgagacagagtttcgctcttgttgcccaggctggagtgcagtggcgtgatctcggctcactgcatcctccacctcctgggttcaagtgattctcctgcttgggcctcacgagtagctgggattacaggtactcgctcacttgggaggccgaggtaggagaatcacttgaacccgggaggtggaggttgcagtgaggcaggagaatcacttgaacccaggaggtggagactgcagtgagccgagattgtaccattgcactctaggctgggcaatggagtgagactccgtctcaaaaaaaaaaaaaaaaaaaaaaattcagagcaacagtcatataacactcccacaagagataattcttcacgatgttaaacgagaactgtcaaaagtaagccaatttcagggacttttataagaaagcatgtctcaagttcattgttttagctggggttttttgtttgcttgttttgttttttgttattttgttatttttctttatttatttttgagacagggtctcactgtgtctcctaggctttcgtgtagcggcgtaatcaccgcagctcactgtagactccaactcctgggcttaggtgatcctcccacttcagcctctgggtagctgggacctaagtatgtaccaaccaccacacccggctaattaaaaaaaattattttgtagagatggggtttcactagctgggactacaagcatgtgccaccatgcctggctaattaaaaaaaatttttttggtagagactgggtttcactgtgttgcccaggctggtcttgaactctttagctcagtctgcccacctcaccctcccaaagtgctgggtttacaggtgtgagccactgtgcctggcccttacctgttttttttttgttttttttcctctcaggagatgttcctgaattacctggggtcttgacttaaagttcagaactaattgtaataggtaacatatggtacttcttagtttataaaatttgtttacattaatatcctgcctattcctcactgaatcttttaaggtgaatttcacatttaagtctattatacaattgaggaaactcaggcttaatgaggaaactggggtttagggagactttgtgaacatcaaacttttcttttaatggcagagtctccctctttcacccatgctggagtaccgtggtttgatcgtagctcactgtaacctcaaattcctgggcccagatattctcctgcttcagtctcctatgtagctaggaccacaggcatgcaccactatgcttggctaattattatttttttattattattctttgtggagatgtggtcttgctgtgttgcccagcctggttttgaactcctggattgaagcaatcctctggccctggcctctttgtaatatgcccccacaaatatgccccagccccatattttcataaatgctacttgataaattctacctgatttttagtatattcagaagaaagtgcgtaatctcttattttgattaaattttgttccttgtagcttagaactttaggtgagattccccaagcatttggtgagttgattgtctaagcctaaagtaaggtaatgttgctttatgctgcattcagaacattcttgtaactgtaacattcaccttagaatggaaatgtacagattgtttataaacatcagattcctatctaattctctttactttttgtgactttgttgtaacttaactcagtatcttataatattttggtttgattcttttttgattatctaaaaaatagattattaggtaggaacattaagacttaaaagtgaataaacaagttttatgtctcttttctgttggatgctggttgtctgtgctgtttaagtttttgtctggttttaaaaagcttgtagaaccagcataactaagaaagtagcgtggccgggcgccgttgctcatgcctgtaatcccagcactttgggaggccgaggtcggtagatcacaaggtcaagagattgataccatcctggccaacatggtaaaaccccgtctctactaaaaatacaaaaattagctgggtatggtggcgcgtacctgtaatcctagctactcgggaggctgaggtaggagaatcacttgaacctgggaggcagaggttgcggtgagccgagatcacaccattgcactccagcctgggtgacaagagcaaaactctgtctcaaaaaaaaagttgcttttacttttctaactgaaattcagattttaattcactaaattgtaggcaaaacatctttaattctttaccagcttttttaaaaaatagattttttcctttaatagattgtgtacaaaactaaagataattgaataaaatggcaaaaattgttgaaaacaagagtatatctgtgatatgaatagtcatacatattaataaaaatcttctgtctcataaatgaatttgaaaaaatgctgttattttgaaactaccttttttttttaagttgaggtgtatatgtgcaggtttgttacataggttaagcctagtacccattcgttatttttgctgattctctccctcctaccatccttcaccctccgaaaggccccagtgtgtgtggtttccctctatgtgtccacatgttctcatcatttagctcccgcttgtaagtgagaacatgcgctatttggctttgcaatcctgtgttagtttgttaaggataatggcctccagttccatccatgtggaattactattctaaacatctggtaacttgcaaggtgtcatggaacccagcttatcaggaaacattgcttaacagattcttgaaagcaactggcctgaaaagatacttagttcttgactgagaataacttctgccttgcttcattgctgcatctggaaaatatttggattaagagccataatatataatacgtgctattcaagcatggtagataatctgtcttttttttttttttttttttttttttttttttttttgagacagggtcaccctctgttgcccaggctggagtgcagtggcgtcatctcagctcactgcaacctctgcatcccaggtgttgccctcccacctcagccttctgagtagctgagactacaggcgtgcgccactatgtccagctgatttttgtattttttagtagagatggggtgtatgtattcgttcgttttcacgttgctgataaaggcataaccgaaactgggaacaaaaagaggtttaattggacttacagttccacatggctggggaggcttcagaatcatggcaggaggcgaaaggcacctattacattgtggtggcaagagaaaaatgaggaagaagcaaaaccagaaacaagataatcccatccgatctcgtgagacttattcactatcacgagaatagcatgggaaagaccagcctccatgattcagttacctccccctgggtctctcctgcaacacgtgggaattctgagagctacagtgcaagttgagatttgggtgaggacacagccaaaccatatcattccacccctggtccctccatatctcatgtcctccctttcaaaaccaatcttgccttcccagcagtcctgcaaagtcttaactcatttcagcattaacccaaaagtccacagtccaaagtcttatttgagacaaggcaagtcccttctgcctatgagcctgtaaaatgaaaagcaaactagttacttcctagatacaatgggggtataggtattgggtaaatgcagccattccaaatgggagaaattggctaaaacaaaggggttacagggcccatgcaagtccagaatccagcgggacagtcaaattttaaagctccaaaataatctcctttgactccaggtctcagatccaggtcacgctgatgcaagaggtgggttcccatggtcttgggcagctctgctcctgcggctttgcagggtacggcctccctcctgtctgctttcaccggctggccttgagtgtctgcagcttttccaggcgacagtgcaagctgtcggtggatctaccattctggggtctggaagacagtggccctcttctcacagctgggactcacagtagggactcgtatggggggctctgaccccacatttcccttcagcactgccttagcagaggttctccatgagggccctgtccctgcagcaaacttttgcctgggcatctggacgtttccatacatcttctgaaatcaagttggaggttcccaaacctcaattcttgacttctgtgaacccacttgctcaacaccacgtggaagctgccaaggcttggggcttccaccctctgaagccacagcctgagctgtacgtcagcccctttcagccacagctggagtggctgggacacagggtaccaagtccctaggctgcacacagcatggggaccctgggcccagctcatgaaaccacttttttctcctgggcctccaggcctgtgatgggaggggctgctgccaggaagttctctgacatggactggagacattttctccatagtcttggggattaacattaggctccttgcttcttatgcagatttctgcagccagcttgaatttctccccagaaaatgggtttttcctttcttttttttttttttttttttttccctgagagggagtctcactctgtcgcccgggctggagtgcagtggcatgatcttggctccgcctcctggattcatgccattctcttgactcagcctcccgagtagctgggactacaggtgaccaccaccacacccggctaattttttgtatttttagtagagacagggtttcagcatgttagccaggatggtctcaatctcctgaccttgtgatctacccgccttggcctcccaaagtcctgggattacaggcgtgagccactgcgtctggccaaaaaatgttgtttttttttctatcatatagtcaggctgcaaattttctaaactttcatgctctacttccccgttttttttttttttaaagatggagtcttgctctgtcgcccaggctggactgcagtggtgcgatctctgctcactgaaacctccacctcctgggttgaagtgattctcctgcctcagcctccaggtagctgggatcccagccacagtagctgggattagccaccactcctggctaatttttgtgtttttagtagagatggggtttcaccatgttggccaggctggtctcgaaactgctgacttcagaggatccgcccaccttggcgtcccaaaatgctaggattacaggcgtgagccactgcccctggttgctctgcttccctttgaaaacgaaatacttttcaaacacccaggtcaccttttggatgctttactgcttagaaatttcttttgccagataccctaaatcatctttctcaagttcaaagttccacaaatctctagggcaggggcaaaatgctgccagtctctttgctaaaacataataagagtcacctttgctccagttcccaacgaactcctcatttccatctgagaccacctcagcctggaccttattgttcatatcaccatcagcatttttgtaaaagtcattcaacaagtctctaggagattctaaactttcccaggttttcctgtcttctgagccctccaaactgttccaaactctgcctgttacccacttccaaagtcacttcctcatttccgggtatcttttcagcaattccgcgttctactgttaccagtttactgtattagttcgttttcttgctgctgatacagacatacccgaaactgggaacaagaaaaggtttaattggacttgtagttccacatggctggggaggcctcagaatcatgataggaagtgaaaggcacttcttacatgtcaggggcaagagaaaaatgaggaagaagcaaaaatggaaacccctgataaacctgtcagatcttgtgagacttactatcgcaacaatagcacaggaaagactggccccgtgattcagttacctcccgctgggtcccttccgtaacacatgggaattctgggagatacaagtcaagttgagatttctgtggggacgcagccaaaccatatcacctggtttctctgtgttgcccaggctagtcttgaactcctgggctcaagcgatctgcatgcctcggtccatcaaaatattggaattacaggcttgagccactgtgcccggcctctgctgaccttttaaataaagctttggcaagtgacagtttgaggttaggaaccattgataattgatgaattaccggataagtctttatttcttccttctacatctgataataaatccgatgatttccattttcatgtcattgcgcctctactgttaacatataattatttatactttctatttttttttttttaactcttccactttctctttttgtggtggggtacttaccctagcaataaacacattgttgtcttagatgctgcattggatagcagatacgtggatatagtattagactagagaatgcttaagaattctgcattccaaaagcatactaaagcctctgtttctagtgcttaagcaacagtgtccttgatatcagtctaagaaagtctggatattgacatgcaaatgaaaaaatcagactctttgaattttgtttgtcatatatgcaagtagcttaaaagaatattggaatactgccaaaatacatttcaaaaatattaaatcttcttattcgttattttgactttggaaagatttgtgaacccccttaaaatacatgcaatattttgtttattttcatatgtgcttctttgagaggaaagatcttagctttcattatattctcaaaggagtccagtaacctcaaaaaaggttaagaacttctataccaggtagtatgaaaatattgcctgatttatttgtactgttggttaatgtagattgttcgttgcaaaatattctaaactctttctttaaaaaatgtttactccatttaagaaccatttattagaggctgggcatggaggctctttcctgtaatctcagcactttgggtggccgaggtgacagaatcgcttgagcccaggaattaaagaccagcctaggcaacatagcgggaccccgtctctagcggaggttgggggtaaaaagaaaaaattagctaggcatggtggcatgcatctgttgtcccagctactcaggaggctaaggtaggaggatctcttgagcctaggagttagaggctgcagtgagctatgatcgatcatgccattgctctctagcctgagtgacagagtgaggaccctgtctcaagaaaaacagaaaaacgttaataaaagccaggcgtggtggctcatgcctgtaattccagcactttgggaggccaaggcaggtggatcacttgaggtcaggagttgggaaccagcctgaccaacatggtgaaaccctgtctctactaaaaatacaaaaaaatttagctaggcatagtggtatgcacctgtaataccagctactcgggaggctgaggcaaaacaatcgcttgaacccaggaggcagaggttgcagtaagccgagatcacgccactgcactccagcctgggcgacagtgagactccgtctcaaaaaaaaaaaaaattatttctgttttcatgtggtattttgcgattatgtgttaaccattaaaaggcaactggaaaggtaaaattgtattcttaaaataagtatgataactcaatcatatacttgtgctttctgatagcaaaaatacatgttaaaggttggaaaggttaaagttagaaaattcacaggctgaaataatctgagttaaagggtgccttagatgttagctactatgtagaaaatttagattaattactcaggttatagagttgatgacaaacttgaaccggcatcacctttcttccccccccccccccccccgaggcggagtcttgttctgtcgcccagagctggagtgcagtggcgcgatcttggctcactgcaacctctgactccctggttcaagcaattcaactgcctcagcctcccaagtagctgggattacatgcgcgtgccaccaagcccggctaatttttgtatttttagtagagatagggtttcaccatattggccaggctggtcttgaagtccagatcttgtgatctgcccgcatcgacctcccagagtgctgggattacagtcgtgagccaccccgcctgggtgcaattttttatatgtttgttggccatttgtatatcttcttttgagaattgtctcttcatgtccttagccaactttttgatgggattgtttgttttttcttactgacttgtttgagttcattgtagattctggatatcagtcctttgtcagatgtatagattgtgaagattttctcccaccctgtgggttgtctgtttactctgctgattgttccttttgccatccaaaagctcttcagtttaattaggtcccagctatttatctttgtttttattgcatttgcttttgggttcttggtcatgagatccttgcctaagccaatgtctagaagggtttttccagtgttaccttctagaatttttagtttcaggtcttaggtttaagtccttaattcatcctgagttgatttttgtataaggtgagagatgaggatccagtttcattttcctgtatgtggctagccagttatctcagcactatttattgaaaagggtgtcctttccctactttatgtgtttgtttgctttgttgaagatcagttggctgtaagtatttgggtttatttctgggttctccattctgttccattggtctatgtgcctattttttaccagtgccacgctgttttggtgactatggccttatagtatagtttgaaagcagatagtgtgatgcctccagatttgttctttttgcttagtcttactttggctatgcagtctcttttttggttccacataaattttagaatcattttttgtaattctatgaagaatgatggtattttgatggggattgtgttgaatttgtagattgcttttggcagtatggtcattttcacaatattctacccatccatgagcatgggatgtgtttccatttgtttgtgtcatctctgatttcttttggcaacattttatagttttccttgtagatgtctttcaactccttggttaggtatattcctaagtattttatttgtggctattgtaaaaggggttgagttcttgatttgatcctctgcttagttgctcttggtgtatagaagagctactgatttgtgtacattaatcttgaatccagaaactttgccgaattcttttatcagttctaggagctatctgaggagtctttagggttttcaaggtaaacgatcatatcgtcagcaaacagtgacagtttgacttcctctttactgacttggatgccctttatttctttctcttgtctgattgctctggctaggacttccagtactatgttgaagaggagcggtgagagtgggcatccttgtcttgttcgagttctcagagggaatgctttcaacttttcccctttcattattatgttggctgtgggtttgtcatagttggcttttattatgttatttcccttgtatgctgattttgcagagagttttaattataaagggattctggattttgttgaacgctttttctacatctattgagatgatcatgtggtttttgtttttaattctgtatgtattgtatcacatttattgacctgcatatattaaaccatccctgcatccctaatatgaaacctacttgatcatggtggatcaacacatctttttgatatgttgttggatttggttagctagtatttttttaaggattttagcatctatgttcattaaggatattggtctgtagttttctttttttggttgtttggttgtagtttcctttcctggttttggtattagggtgatgctggcttcataaaatgaattagggagggctccttctttctctgtcttgtggaatattatcaaaagaattggtaccaactcttctttgaatgtctgatagaattctgctgtgaatccgtctggtcctggacctttttttgttggtaatttcttaattaccgtttcagtgtcactgcttgttattggtctgttcagcgtatctaattcttcctgatttatgtgaggagggttgtgtttttccaagaatttatccatctcttttaggttttctcatttatgtgtgtaaaggtgctcacagtagccttgaatgatcttttgtatttctgtggtgtcagttgtaatatctcctgtttcatttcttagtgaggttatttggattttctctctgctttccttggttaatcttgctaatggtctatcaattttgttttatcttttcaaagaaccagcttgtttcatttatcttttgtactgtgtttttttgtttgtttgtttcaatttcatttagttctgctctgatcttggttatttattttcttctgctgggtttgggtttggtttgttcctctttctctagttccttgaggtgtgaccttagattgtctgtgctctttcagactttttgatgtaggcgtttagggctatgaactttcctcttagcactgcgtttgctgtatcccagaggttttgatagggtgtgtcattattgtcattcagttcaaagaattttttaatttccatcttgatttcatttttgacccagtgctcattcaggaacaggttatttaatttccatgtatttgcatggttttgaaggttcattttggagtttattttcagttttattccatcgtggtctgagagagtgcttgatataatttcaattttcttaaatttattgatgctcgttttgtggtctgctttggagaaagttccatgggctgttgaatagaatgtgtattctgtggttattggatgagatgttctgtgtatatctgttaagtccatttgttccagggtatagtttaaatccgttgttcctttgttgactttctgtcttgatgacctgtctagtgctgtcagtggagtattgaagtcccccactattattgtgttgctgtctgtctcatttcttaggtctattagtaattgttttataaatttgggcactccagtgttagatgcatatatgtttaggattgtggtattttcctgttggacaaggccttttactattatataacgtccctctttttctcttttaaccgctgttgctttaaaatttgttttgtctgatatgagaatagctgcccctgcttgcttttggtgtccatttgcatgaaatgcccttttccacccctttactttaaatttatgtgagtccttatgctttaggtgagtctcctgaacaggaggctgcagatggttggtgagttcttactcagtctgcagttctgcatcttttaagtggagtatttagtccatttccattcaatgttagtattgaaatgtgaggtaccgcggcattcatcatgctctttgttgcctgtgtactttgggtttttttgttttttgcttttgctttttaacttgaatttttgttttgtaggtcctatgtgatttatgctttaaagaggttctgttttgatgtgtttcaaggatttgtttcaagatttagagctccgtttagcagttcttgtaatggtggcttggtaatggtgaattctctcagcatttgtttgtctgaaaatgactgtagctttccttcatacacgatgcttggtttcactggatataaaattcttggctgataattgttttgtttgaggaggccgaagataaggccctaatcccttctagcttgtagggtttttgctgagaaatctgctgttaaactgataggttttcctttataggttacctggtgcttctgtctcacagctcttaagattctttcctttgtcttaactttggataacctgatgacagtgtgcctagtgaagatctttttgcagtgactttcccaggtgttctttgtgcttcttgtatttgaatgtctaggtctctagcagggccgggggagtttcctcagttattctcccaaatatgttttccacgcttttagagttctcttcttcctcaggaacactgattattcttaggtttggtcgtttaagataatcccagacgtcttggaagctttgttcatattttcttattcttttttctttgtctttgttgggttgggttactgtcttcaagctggtaattgaaaatagacatgatttaaatatctagccataaaagattgttaaaaatagtacatccacatgatcaaatatcattcagtcattaaaaattatgacaaggctgggcgcggtggcccacgcctgcaatcccagcactttgggaggctgaggtggtggatcacctgaggtcatgagtttgagaccagcctgaccaacatggtgaaaccttgtctctactaaaaatacaaaaattagccaggcgtggtggcgtgtgcttgtaatcccagctactcaggaggctgaggcaggggaatcactagaacccgggaggcagaggctgcagtgagccaaggttggaccactgcacttcagcctgggcgacagagcaagatgctctgtctcaaaaaaaaaaagaaagaaaaagaaagaaaggaaacttggcccaggctatctgcctcccagcggtgaaagaaaagggctttagttcttccgtagtctgtgaagtctgcatgccggattcgcaccctcccctgagttctggccaggaggcttcccaccccattcagatggttacaaaatttggctagagaattccttctccctgtggggttttaccccctccttctctgtccaccctccctgtggtgccaggcaagaatgggctgcttggggatccagtgagctcccggggcctttctgctgcatcctctatccctgcattttgcgtggctctctaagttagtctgaaacttcgactgcaaacggaccttcagcttctctagtgggggtgtgtgctcaggagaggagggtcttcctttctcacttctgcagttgggacactcacagtatttggggtgtctcccgggtcctgcaggagcaatccgcttccttcagagggtctgtggatcctcttggggttgctggtttgttcttgcagtggatctggagctaaaattcacagtgcaagcctctgcatgcagctctgtccgaagctgcaatctagtcctgcttcctgtctgccatgatcctttaattcctctccttctgattttttaaaaaatgttttattatggaaaatgtcagacccttccacaaagttagagtagtgtaatgaaccattatgtacccattacccagcctcaacagttagcaattcaaagcctgtcttgtttcatgtatctctcttattcactgtcattacccaagtcacagacatgatattattttacttcgatttgatgtagctttttcattgtttattttctttttgtagagatggggtcttgctgtgttgctcaggctggtcttgaactcctggcctcaaacaatcctcctgccttggcctcccgaagtcttgggatttcaggcgtgagcctccacactcagcctcattgtgtatttctgaaagatttttaaaaatagccacaatactgttatcacttcaaaaaaattcagttatttagtattaccagatgtccagccagtgttcaaattttcccaagtttgttcattggtttattttacaatttgtctaactctagatctaaattaagtctataaattgctattggttgatatgttacttgtctcacttaatccagaggtttccctttctatctcttttttcttcccttggtatttattgaagaaactgggtcatttgttttataggacttttcacagtctagattttgttgattgtatccccatggtgttctttaacgtacagttggccctctgtatctgtgggttctgcatctgtgaattcaatcccggatagaaaatattagaaaaaaatatgtctgtactgaatatatacagacttttattcttgtcattctcttaataatacattataacaactatttacataatatttacattgtattgagtattatatgtaatccagagatgatttatattataggggaagatatgcataggttatatgtaaatcctacaccattttttatcagggatatgagcaacctcggataccaaaatcctggaggtcctagaaccattgccccatggatactgaggtgcacactgtattcatctgccctctgtacttcttgcagattggtagttggagccagaggcttgattcatgtttgatttttgtggcaagaatacttcttgggtggtagttgttattccatcactacaccaatataaactgtagttatatagatatataactataatcatacccctggtctggttgtctttttgttgtttcactaggctttggttaattctttcttcatttctcctgtggtctttttctccaccatcaagatttatttttttctttttctttttctttcttttcttttttttttttggagctggagttttgctctgttgccagggcagtgcagtgatgcaatctcagctcactgcaacctccgtctcctgggttccagcacttctcctccctcagcctcccgagtagctgggattacaggtgcctgctgccacaaccagctaatttttgtatttttagtagagatggggtttcgccatgttggtcaggctggactcaaactcctgacctcaggtaatccacctgcctcagcctcccaaagtgctgggattacaggtgtgagccactgtgcccagccaggatttctttttttttttttaatttgtaaggcatcatacctagactatcaggatttaagtatctaatttggctgggggaagaaagagaaaaactgcttttcaatattttcatctacttttaaaatatttgtttatggtaccatctctgcttcatctctttcctcatttaaatatttctgccatgtgaaaccattttactgaaaccattctcatcaaggttatcaacgaactccttgctgagtacaacagacccatccaaccttactttgcttgatagttggacaggtttggatactgttgattgcttccttgaaatactttcttggcttttgagacatactctctcctctttttcttttacctcttgaactgttactttcagcctcagttgtaggctctttttaatataggtgttgctctgcacagtctccatgggtaatcttaccatctgctgtggtttcagaaaacatttctaaataaaaagtaccaaaccttttttttttttttttttttttaataggttggttcgcttcagaactaacttgtttgttacagtttggtactggagatttcacaggcatcttagaatcaacatacgtaaaatggagttaatcatactttcctcatcccctcacacattctagtttcctgttcaatttagtttagtttttttgtttgtttttttgagacggagtcttgctctgttgcccaccctggagtgcaatggctcaatttcagctcaactgcaacctccgcctcccaggttcaagcgattctcctgcctcagcctctcaagtagctggattacaggtgctcgccaccatgcccagctaattttttgtatttttagtagagacggggttttgccatgttggccaggctggtcttgaactcctgacctcaggtgatccacccaccttggcctcccaaagtcctgagattacaggcatgagccaccgcgcccagtctcaacttggttgtaagccagaaatcacttgactccttgactgactttctccctttctggctgtccacattgagtcactagtcctgtaagatatacccagtaaacaacttaaatgcatctcattttttttatttactcctgttgtcctaatgtagacctctgtcatctgtaaccttcattactgtaagcttcctttctgatctattcttcactatgtaagtgagtgatttttttttttcctaaaatcttatctaatggctccctattggccctgggataaattataaagacctgagtttattttgtggcctgtttgcttgctcagcttcgtcctgagtcatcacccgcaggtggcaatacttgtcacattattcacgctgttttaattgccttcttggccgatgcttccagtagactgtaacttcttgaatgtaaagaccaagtccagccaggtgtggtggctcaagcctgtaatccgagcactttggagaccaaggccggcggatcacttgaagtcaggagtttgagaccagcctggccaacatggtgaaaccccgtctttactaaaaatacaaaaagtagccaggcatggtcgtgggtgcctgtaatcccagctactcaggaggctgaggcaggagaatcactagaagctgggaggcagaggttgcagtgagctgagattgtgccagtgccctcctgggcaacaagagtgaaactctgtctcaaaaaaaaaaaaaaagaccaagtcattttccccattaaacatgttatttaagacaatacgtagcacataatataaattaagtgttctttatatgtttgttgaatgaataaatttgttcagtacaccaatatatttaatgatttatgtatgtgttttatcattattagataatcctactgtgccagtactgtcatcattctttcttttatttttatttcttaagagacagagtttctctctggcgcccagcctggagtatagtgccacaatcatggttcactgcagccttgacctcctgggctcaagcaaccctcctgcctctgccgcctgagtagctgggactgactataggtgtgtgccaccatgccctgccaattttttttacttgtagagacagggtctcgctttgtttcccaggctggtctcaaactcctgggctcaagcaatccttccacctcagcctcccaaagtgttgggattacaggcatgagccaccatgtactacactgtcattattcttgtacattcatttgcttttttggctagcagagatatgtttataattaaattggactctgtaatatacataatatagtgggggtttttttctgattaaagcagggagttttgccctacctcgttttcactctatataattgagccaggcatggtggctcatgcttgtaatcctaggactttgggaggccaagccaggaggattgcttcagttcagaaatttgagaccagcctgggcaacgtggcaaaaccctgtctctacaaaaatagaaaaatacaaaaaaaaaaaaaaaaaaaattagctggggttggtggcacatgcctgtattcttagctactcaagaggctgagcccagcttggttgaggctgcaatgaaccatgattatgctgccactgtacgccagcctggacaacaaaataagaccccatctcaaaaaagaaacagtatgaagaaaagtgagacttgaataattgggagttgttaagtaccaaagaagtatggtttactggcttgtctgttgtgtttggttccagttccactagttcttactgattccaaccatatttctcagaatttagatggagtgatagtgatggctttcagctatcatttgtagttagctgggctccaggtcagaagaatccttaaggattataaaataaattcctgcttatatttactagaattgttcttcagataaggatctctaatgaaatagcagttgccatagcgagcacctgagctgtcactttttcactcagggctcatgttcgtttttcgtttgtttgtttttgagacggactcttcctctgttgcccagactggagtacagtagcatgttggctcactgcaacctctgtctcccaggttcaagcaatttctcgcaaatttttgtatttttagtagagacgagatttcaccgtgttggccaggctggtcgcaaactcctcacctcaagtggtctgcccacctcagcctcccaaagtgctaggtttgcagacataagccaccacgcctggcctcagggctcatatttgaaacccgaaggtatgcatttttttttcctttaaaagaaattgggtctcgctttgtcacctaggctggagtgcaatggcatgatcgtagctttccataaccttgaactcttgggtagcaagcattcctcctgccttagcttctcaagtaagcatgcaccatcacacctacctaatttttaaaattttctgtagagacggggtctcctgtgtttcccaggctggtcttgaactcctgggctcaagtgatcctcttgccttaacctcccaaagtactaggattaattacatatgtgagccaccacaccccgcctctcattcttctttcttcactggcttattcattactgtattctcagtgcctggagcagtgactggaatggcatttgaaaggtactcaggaaatggtccttaactcttctgtccatgataggtttctagattggttgtcccacaggatcttcattatatgttaatttcatatcatttggaggatgatttttttattgctttgaattgcctcttccaatcaaattttatatataccagtagcctctattttaagtaagaccatctcaaatacatttcttaattaggtacattggttaagagagcataagattccagcactttgggagactgaggcaggaggatcccatgaatacaggagtttgagaccagcaatgtagggagacctgtctctacaaaaaaaaaatttaagaattagctgggcatggtggtgtgtgcctgtcgtcccagctgcttgggaagctgaggtgggaggatcgcttaagcccagagggggaaggctgcaataagctgtgatcatgccactgcactccaacctgtgtgagaacctgtctccaaaaaaacaataaaaagcgtaagattgctaagtagtgtatgttataaataccggccattctaaggttattggtgactaacactcaaccttgaaggttacttcagttatagttggcactgttcggcttgtgcagttcatgaaacccttatctgttttaccttttataccttttttgtaaatttgaaattttactttttgtctctaagagagaattacattcgtttagagttacatgttaatatttgaaatcaaatgtatctggcaggttaacatgattgggagtgggtaaatgtatgttaaatttaaaagtaatgctgttttggctcattgaattattaatttaaaagacaaaacagtatggtttttgacattagttgactttcactataagtggaaaatcatcatctaatatttatactaacatcacaataaaatttatctttgaaaatgagtactgtaactaataatttagaaataaattttaagtgaaataatctttttttttcttctctttctccttaggtggaatgaatcttacttgttgaatatcttctggttactagttggattcatttgtgaaagaatcattttcccctgtgtggaagacacttagtggcatatttaaattataagtccacggatcaaaaagctttttgatttcccaaaggagggacataccactatatcagataagcttgacattacagccaagatggtgctgtcccagagacaacgagatgaactgtaagtttctttgttttgtgctttaaaaaaaatctccctcatgagagagaaagtagtaaattaaaatacagctttgggaggtctcttctaagattaaaactatttttaccagtgttccaatattagtttaggcagtttggtctgattttaaaacagtcttattatgatatagcattatttttaaaatttatttattctttctgagaaggagtttttcgcttttgtcacccaggctggagtgcaatggcgccatctcggctcacttcaacctccgcctcccaggttcaagctattcttctgcctcagcctcccaagtagctgggattacaggcacccgctaccatgcctagctaatttttgtatttttagtagagatgggctttcaccatcttgtccaggctggtctcgaactcctgacctcaagtgatccactcacctcggcctcccaaagtgctgggattacaggcatgagccactttgcccggccgtgatacagcattattcacccttgtgacttgactgtatgtaagtttaacgcaaaacagacaagtcagttgggatgagttttaccctaagcttatttttatttttatttttgagatggactctcgttctgtcacccaggctggagtgcagtggcgcaatctcggctcactgcaagctctgcctcctgggttcacgccattcttctgcctcaacctcccgagtagctgagactacaggtgaccgtcaacacgcctggctaagttttgtatttttagtagagatggggtttcaccgtgttagccaggatggtctcaatctcctgacctcgtgatccgcctgcctcggcctcccaaagtgctgggattacaggcgtgagccaccgcgcctggcccctaagcttatcttttaaaatattatgttcaataggaagttaggtgcttcatagctcctctaaacctttttttggtgtggaatctgtgcattagaaaaatgaaagctgttttgttcttgttatcactgatgtctttcctttgccttgttgtgtttcttttatcttccaatggccattacagaatttgaagaatttgaactttatgaggtagctaataaaataattaatgcagatgctttaatgagagaggtgtgaaatggtttgacctcttctgttttagagtattttatagcattccatttttataggtgaagaacatagggggattttccactcccccgcttcacctgactagctttaaaaacataaaaacaaaacgggaaaatgtagctttatgttctacttctttttttttttgagatggagtcttgctctgtcgcccaggctggagtgcagtggtgcaatctcggctcactgcaacctccgcttccagggttcaaccaattctcttgcctcagcctcccaagtagctgggattacaggcgcctgccactgcgcccagctaatttttgtatttttagtagagaaaagggtttcaccatctttgccaggctggtctctaactcctgacttcgtgatcctcctgctttggcctcccaaagtgctgggattacaggcatgagtatgttctatatttttacaattaaaaaaaaaattttgtggcttttcaacaatttttatttggaagtaatttcaaatttataaagttgcaagattagcacaaagcatactaatgttttttgaaatacacccattgttaacattttgtaccatttgctttatcatttgcactctgtgtgttgggggtctgtgtgtgcagtatgcaataggtttttcttaaaccatgttagagtaagttgcatatatcaaagaaataccttttcccacaaataaacttaagtagttccccaaaataaggatattctataaaaccatagtatagctagcagttttattaaatttaaccttccatattccagttttatcagttgattccataatgtcctttgtggcactttgttactctcgtacatcatcccatccaggatcaggtatttcatttagccctcatgtgtcttcagtcacatttaatctggaacagttcctcagcttttgtcttttttttttttttttgaccttgatgtttttgaggaatagtctttgttttaaaatagagtatttctcatattgtccttttttttttttttttttgagacagagcctcgcactgtcactcgggctggagtgcaatggtgtgatctcggctcactgcaacctccacttcctgggttcacactattctcctgcctcagcctctcgagtagctggaattacaggcgcacaccaccacacccggcttattttttgtatttttagtagaggcggggtttcactgtgtcggccagactggtctcaaactcctgacctggtgatctgtccacctcagcctcccaaaatgctcatattgtacttttctagtgtttcctcatgatgagattcaggttacgcattcttggccagaatactacataagtagtttgtattcttcttaagagagttggatttagagagacataatggtcatctgcccctcagttttcatcctcaaccaagatgattgattttttcactgtgtagttactgtcattttctttaccacaaataagtgggaagtactttaagaccatgcaaacattcatgttttccatcagtatttccctcctggatttgaggtctattgattctcgcctgaaccatctttactacagtggttatagagtgatggttttcaccaccactcattccacactacaggcagcacttatcattttgctgtaagcaagggactttctttttcttctttttatttacttgtcttttttcttttgtttttgtttttgtttttttgggagatggagtctcactctattacccaggctggagtgcacagagtgcagtgctgcgattttggctcactccaacctctgcctcccgggttcaagcgattctcctgcctcagcctcccaagtagctgagattacaggcacccaccaccactcctggctaatttttgtatttttagtagagacagggtttcaccatgttggccaggctggtcttgaactcctgacctcaggtgatgcgcccacctcggcctcccaaagtgctgggattacagatgtgagccaccacacctggctgtcttttcattattggtgtgaactcatgagttctcatattttccatagtttatcattcattactattctcactgttttcatacttgaattgtcccaaatttggcccatgagagccccctcagttgatgcttttgtatgcttctatcattttgggagattatttccttactttctagaataacaagatgttccgggtttactgtgtacctatcctgccttaattctagaatcagctctttctccaacaagctttggttcttcttagtggcgcatgatatgtattagagaccaagatacgggcactaggtatgggcattattactgggatgtctttgtttctgggccctttaagtagacagaggtagaaaatacatgcatgtataaatacatatactgacaccctagtatacacatatacaagtgttttctcagtcttggcacgattgacattttgggccaaataattccttattgtggggtcagtcttgtatagttttggttgttagcaacatctctggcttccacccactagatgctacaaagaaaattatctccagacattgccagtgtcaccagttgaaaactactgataagtacctacatgtccacatacttaactttagaaatcattaggctacagtgatgcttctaattctggtctgtccccacagaattctttatcttctctcataccatttatttgtatccctcttcttctatagtgagaactctgactcccaataatatcaatagattgattcacttcctcaattctgtaatataggatgagcagcccaagtccagaaatccaaaatgcttcaaaatctgaaactttttgagtgccaacatgacactacaagtggacagttccacacctgactgaccccatgtgacaagttgcaaatgttatttaaaattttgtatagaattaccttcattagaacttggggataagtgttcagaaaaaaataaataaaattgccttcagtctgtatgtataaggcatttatgaaacaaatgaatttcgtgtttagacttggttgagtctcatatccgagatacctcgttagatacatgcaaatattccataatttagaaaaaatgtcgaaatctgaaatacttctgatcccaagcatttcagataagagctactcaacctctacttctcaaatagttttagaattgtttccctcatacttccacgaagaccagacatccgggaaaggattgagaattcgcatgcagctctgctcctgcctgtcctgcccacgacatgatcatcaaatgtgttaataggttacttagaatttgttttgttgttgttttccctctttgcatgatggtattactcatttgaaatatagttgggttcatcttgcttgttttcatcctccccctcactccccgctgtcctatctttaatttttttaatatataaaccattatctatagaaaaacatgtacccagaagtgttactctcttctgaatcccttccaccatgttacccccaactcctttcatcccttgagggaaccaagcttattgtttttaaaaatatgagatagatatatatcttcttatttctccctctttcttaaataaaagtagcatactgtatatgttctttgtttgtttttttgttttggagacaagagtctcattctgtcttccagtctggactggagtgcagtggcatgatcatggctcactgcagccttgacctcctgggctaaagcgattgttacacctcagcctcccgagtagctgggactacaggtgcatgccatgccaccatgctcagctaattttttcctttgccttttttgttttcccccttttgtggagaacggggtctcgctatattgcccaggcaggtctcgaactcctgggctcaagctattctcctgcctctgcccccctaatagctgggattacaggcatgagccactgcacctggccacactcagctaatttttctttagtttttgtagagatggtctcactatgttgcccaggctgcctctgggctcaggtgatgcttgcacctaggcctcacaaagtgctgggattacaagtgtgagccaacacacctggcttttttttttttctcttcccccggagacagaggctttctctgttgcccagactggagtgcagtggggtgatctcagctccctgcaacctctgcctcctgggttcaagtgattcttgtgtctcagcctcctgagtagctggggttacaggcaggcaccaccacaccccgctaattttttgtatttttagtagagacaggatttcaccatgttggccaggctggtctcaagctcctgacctcaacagatcacctgcttcggccttccaaagtgttgggattacaggcgtgagccaccgtgcccggcccacacctggctctttttgatgttgttaaagacagattcaacccctttcgcccaggctggagtacagtggcgcagtcagagctcactgcagcatttaatttctgggctcaagagatcctcccacgtcagtcttctgagcagctgggactgcaggctcccgccaccacatctggctaattttttatttacagattttttttgtaaagatgaagtcttgctatgttgcccacggtggtctcactcttgggcccaagcctcccgagttgctgggattacaggctcaagccactgagcctctcttgctcttttttttttttttcttaccaatccagtatctcctggaactttttccatataagctcataaagtttttccttatttttctttttaaaacagttgtaggctgggcacagtgactcatgcctgtaatcccagcactttgggaggccgagacgggtgcatgaccttaggtcaggagtccaagaccagcctggctaacatggtgaaaccccatctctactaaaaatacaaaaaatgagccgggcgtggtggtgggcgcctctagtctcagctactcgggaggctgaggcaggagaatcacttgaacttgggaggcggaggttgcggtgagccgcgatcacacccttgtacttcagcctgggcaacaagagtgagactccatctcaaaaaataaataaataaataaaacagttgtatatgtagtacctagttctctacttataccttaatgtattcaaccagtctcccgtgtttggtatatttaggtagttttcaatattttgtaactccaaataatactgtaatacataaccctgcatatgtgtacctttgtattatttggaggtatatgtgtttttttagtcattgttatttctgagtcaattcagatctgtcttccagatgctttgtatgaactcactgcagtcacactaccttcataatcaggataagtatttaagcattatgatattatggcccaaaagagagcttttaatttgaataaaaataaagtgaaagaggagaacctaatttcagatgactaaatttatagagagctttagataaataatttaaaatgttcatcaggccaggtgtggtgactcacacctataatcccagcattttgggaggccgaagtgagagaatggcttgagcacagaggttcaagaccagcgtgggcaacctggtgaaaccccgtctctacaaaaaatacaaaaattagccggttgtggtggcaggcacctgtaatcccggctactcagctggctgaggcaagaggattgcttgaccttgggagattgaggctgcagtgagccatgatcatgtcactgcacaccactccagcaacagagcaagatcctgtcaaaaaacaaaaacaaaagtgttcttcaagcaaagaaaatttgtcttataataagatttaaatgtaaatctggggccgggtgcagtggctcatgcctgtcatcccagcactttgggaggctgaggcagatcacttgaggtcaggagttggagaccaacctggccaacatggtgaaacccacctctactaaaaatgcaaaaattagctgggcgtgatagcgcatgcctgtaatcccagctagtcgggaggctgaggcacaagaatcacttgaacctgggaggcagaggttgcagtgagccgagatcgcaccactgcactccagcctgggggacagagggagaccctgtctcaaaaatatatatatttatatatatatatatattttttgttagacggagtctcgctctgtcccccaggctggagtgcagtggcacgatctcagctcactgcaacctccacctcttgggttctcctgcctcagcctcccgagtagctgggactacaggcgcatgccaccacgcctggccacttttttgtatttttagtagagacggggtttcattgtgttagccaggatggtctcactctcctgacctcgtgatccacccgcctggacctcccaaagtgctaggattacaggcatgagccaccacgcctggccaaatatatatatatttctaaatagctaaggagttgagattaaaataaaacttaggagctgaagacatcagtaataatgagggtactgataacaaaaacctatcagatacagccaacatagcctacagaaaatacagtcttcaatgaatctttataaaaatgacagaaaatgaactatgtgttcaatttaaggataagaacgacaaaataagtctaaagaaagcaggaaaggggaagaattaataataaataaaagcagaccttaataaaatagaaaatagtccagtaaacttaattgataaaaccaaaaactagctttttaaaaagaccagtaaaatagacagttttttaaagagaaaatttataaaaccaatttaagaaaatttataaccaatttaataaagagaaaagacataaatgaactttataggaatgagaaattcaacataaaatgaactcagatgattttcaaacttatgagagtacggtatcctattaggtttgaaacaatctgctgggcgcagtggatcacttgaggtcaggagtttgagacctgcctggccaacatggtgaagccccatctctactaaaaatacaaaaattagccgggtgtggtggcacatgcctgtaatccccactactcaggagctgaggcatgagaattgcttgaacctgggaggtggaggttgcagtgagccaaggttgcgcactccagcctgggcaacagagtgagactctgtctcaaaaaataataaaataaataaataaatttgaaaatctgaatgacctgggtgctttttctaggaaaatatgtgataacattggttcaagaaatagtaggaaacttgaatagatcattaaatatagagaacattgtaacattaaagatttcaagcccaggcagtttttaagcctagatgctaattttttcaaatcttaaggaccatttgcttcccagattacattgctttttccgggacataaaggtagtaaatttaggagcttattttataaggtgggcaccaccttcgtagaaacactgggtgaggccaggcatggtggctcacacctgtaaccccagcactcagagaggccgaggtgggtggatctcttgagtccagcctagccaacatggcaaaaccctgtctctattaaaaataaatttggctgggcacagtggctcatgcctgtaatcacagcactttgggaggctgaggcaggtggatcacctgaggtcaggagttcaaggccaacctggccaacatggagaaagcccttctctactaaaaatacaaaaattagctgggcgtcgtggtgcacacctgtagtcccagctacttggggcggtgagggaggtgcgagctgaggcacgagaattgcttgaacccttgaggtggaggttgcagtgagccgagatcgtgccactgcacttcagcctgggagacagagtgagactgtctcagaaaaataaaaatacaaaaattagctgggcatggtggcacacacctgtaatctcagctactattttgaaggctgaggcgtgagaatcacttgaacctgagaggcagagattgcagtgagctgagatcatgccactgtattccagcctgggtgacagagtgagaccctgtctcaaaaaggaaaacaagaagattacagtctaatgatttctgtgaactcagattaaacatactaaataatataatagtggaatccagtcggatatgaaaaacattgctcattgccaaatgtattcatccactctcatgctgctaataaaaacatacccaagacagggtaatttataaaggagagagggcagccgggcgaggtggctcacgcctgtaatcccagcactttgggaggctgaggtgggtggatcatggggtcaggtgattgagaccatcctggctaacacagtgaaactccgtctctactaaaaatacaaaaaattagccgggcatggtggcgggcgcctttagttccagctactcgggaggctgaggcaggagaatggggtgaacccgggaggcagagtttgcagtgatccgagatcatgccgctgcactccagtctgggcaacagagtgagactctctcaaaataaataaataaataaataaataaaggaaagaggtttaattgactcacagttcaacatggctggcaggcctcaggaaagttaaaataatgacagaaggggaagcacacgtcgtccttcacatagtggcagaaaggagaagaatgagagacgagtgaagggggaagccccttattaagccattagatctcatgagagcttactatcatgagaacagcatgggggaaccaccaccatgatccagttaccttccaccgggtccctcccaccacacgtggggattatgggacctacaattcaagatgaggtttgggtggggacacagccaaaccctatcaccaagtataatttttcccgtgattacaaggttggttcaacattaagaaatttatggccgggcatggtggctcacacctgtaatcccagcactttgggaagccaaagtgggtggatcacttgaggtcaagagttcaagaccagcctggccaacatggtgaaaccccatacctactaaaaatacaaaaaaatagccgggtgtggtggcacacacctgtagccccagctaattgggaggctgaggtgggagactctcatgagcccagggggcagaggttgcagtgacctgagatcgtgccattgcactccatgctgggcaacagagtgagactctgtctcaaaaaaaaaaaaaaaagtgaaacaccatatgattaacccaaaatatagaaaatggtgtatttttaatacccattcctgatggttaaaaaaaaaaaaccctgtagaaaataacaggatattttcttaacttgattatggctacctaccagaaatttacaacaaacattaaaatataaatactaggtgcattcccattaaagtcagcaagaaactaagagttcctgtgtctctgcatctatttcagtatatatttgagattccagctcatgtagtaaggcaacagaaagaattagaactattggaaaggaagcagccaaacatttataggtgacagcatctacagagccaacctaagggaatcaacaattacaattaatggtttcagggccaggtgggggtggctcacacctgtaacccgagcactttgggatgtcgaggctgagacaggaggattgcttgaaactgggaggcagaggctgcagtgaggcgagatcatgccactgcactccagcctgggcaacaaagcaagactgtctcaaaaaaaaaaaaaaaaaattaatgggtttagtatggtaacctgaaacaagatggcatacaaaaataaactcttcctggccaggtgcagtggctcacacctttaatcccagcattttggaaggccgaggcgggtgaatcacctaagataaggagttcaagaccagcctggccaatatgacgaaaccccatctctactaaaaatacaaaaatctagccagccgtggtggtgcgcgcctgtagtcccacatacttgggaggctgaggcaggaggatcgcttgaacctgggaggcggggaggttgcagtgagcggatgtcgtgccactgcactccagcctgggcaacagtaagactccgtctcaaaataaataaataataaactgttcttgttgttggataatatagtagaaaagattttccttgtttctggatgaaaaagtcagtattggacagatatcacaactcttaaaataataaaattaaatgcaatcccaatcaaaattcaaactaaatttctcattaacttgaccagcttgatcttaaaaatcatttggaagagaaaaataaataaaatattttaaatgataaatgggaaagcacctgaatctatcagatatacaaatattattgtaaaatgtggaatagacaaataggttaggggaacaaagttcaaagacatgcccatttatgaaatttagcatgggataaggtggtattaaaagccttaatgttgaacacatacagaataacagtataaagtggtagagaaaatataccctttgggtagaggtggacttcctcaaggtataaaatgtagaaacaaaaggaagactggtaagtttgactgtatcaaaatagaaaacttctgtgtgaagaaaggcctcaaaacaggccaggcactgtggcttaggcctggaatccctgcgctttgggaggccaaggagtttgagatcggcctgggcaacgtaggtgcaagattttatctttacaaaaaattgatttaaaaaatagtctggcagccaggtgcagtggctcacgcctgtaatcccaacactttgggaggccgaggcgggtggatcacttgaggtcaggagttcaagaccagcttggacaacatggcaaaaccccatctctactgaaaatacgaacattagccagacgtggcggtgtgcacctgtaatcccagctactcaggaggctgagacaggagaatcacttgaacccgggagctggaggttgcagtgagccgagactgcaccactgcactccagcctgggtgacagagcaagactccatctaaaaaaaaaaaaaaaatacagggatgtcggcgcagtcttgggacctacctgggaggcctcagtgggaggatcctgggaggtcttgcgccactgcactccagcctgggtgacagagcaagactctgtctcaaaaaaaaaaaaaaaaaaaaaggaagttaattgaaaaaatcaaattttatgtgggtatataaaagtaatcccacaatttatagaaatattttctttaaaattattgtgagttctaaccatttttttgtgtgtgtataatgccattctcttcctctgtgaagtgcctgttcggggtgttgctacgtttttgttttgttgtgttttctgttgtagtgtttacatttttcttgtcgattcctaagaggactttagggtactgagtcacccatggtcatgtgttgcagagaagtgtcacagagtgaaaactgtcttttccttgatactacctttagattcatatttgggaagaccttcgctaatcatgactacataagtattcacttttactttcttaagacctttttgttttcatttctttttatagtaatgtctaagccatctggaatttatgtttgttgattatgcaagaaagggatcgaagtgctttttctgagtcattatccacatgccgaaacatttattgaatagccctttccttattgatctgaaaacaccttcttataaaaccttgcattggtttttggacttgctgtgctttcaggagtcagaagaacattcttttgattattgtagctttacattaataatacattttggccgggtgcggtggctcacgtatgtaatcctagcattttgggagactgaggcaggcggaacacctgaggtcaggggttcaagaccagactggccaacatggcaaaaccccgtctctacaaaaaaaaaaaaaaaaaaaaattagctgggcatggtggtgcctgcctgaaatcccagctactttgggaggctgaggcaggagaacctcttgagcctgggaggtagaggctgcagtgagccgagcttgcaccactgcactccaacttgggtaacagagtgagactccatctcaaaaaaaaaaaaaagaaaaatacatttcaatatgaggtaataaattctcctaaattttttgttttgtaaacctccttgcttctcttaaattattttcccaaaaagccttaagtgttttccgtagtaattttgatttgggaatggagtgagtgacttggtagagggtgccatatgcctttttgcctttccccagtttcccctactgttaacatctcacatttatgtggtgtatttattataattgatgagccaacattgacacattattactgaagtccatagttgacattagggtttactctttttgttgtatattctgttggttttgacaaatgcctaatgttatatatccatcagtcatacagaataaattcactgccctaaaaatctcagcctccccctattcatccttccctgcctccctaaacccctcatatttttactgttaaccatagttttgtcttttccagaaaattacaattatatagcttgtatccttttcagattggctgctttgacttaacaatatgtacttaacatttctaggccagacacagtggctcacgcctgtaatcccacactttgggaggccaaggcgggcaaatcacgaggtcaggagatcgagaccatcctggctaacacggtgaaaccccgtctctactaaaaatacaaaaaaaaaaattggccgggcgtggtggcgggtgcctgtagtcccagctactcgggaggctgaggcaggagaatggcgtgaacccgggaggcggagcttgcagtgagccaagatcgcgccactgcactccagcctgggcggcagagcgagactccgtctcaaacaaaacaaaacaaaaaccaaaaacatttctccatgtgttttcatgactgtgatatatttttaagcatttttgttgttgtttactttattgctttaaaaaactgacttttgcagttagttgaggtcctgaggtttctcctgtgaatctgtttgaacatcatatatatttggcattgattggaaagcggtttttccctggcctgtgtgaaatacactgaaggtctgcacctgcccgcgcacttcacgttgtacatgggaatgtactatagctgcacatgttcatgtagtggcgttagatgccaaatagttctagggcttagtttaagattgggtactttttgtcaggaaacaacaggtgctggagaggatttggagaaataggaacacttttgcactgttggtgggactgtaaactagttcaaccgttatggaagtcagtgtggcgattcctcagggatctagaactggaaatatcatttgacccagccatcccattactgggtatatatacccaaaggattataaatcatgctgctataaagacacatgcacacatatgtttattgtggcactgttcacaatagcaaagacttggaaccaacccagatgtccaacaacgatagactggattaagaaaatgtggtacatatacatcgtggaatactatgcagccataaaaaaggatgagtttgtgccctttatagggacatggatgaagctggaaaccatcattctcagcaaactattgcagggacaaaaaaccaaacaccacatgttctcactcataggtgggaattgaacaatgagaacagctggacacaggaaggggaacatcacacaccagggcctgtcgtgaggtgaggggagaggggagggatagcattaggagatatacctaatgtaaatgacgagttaatgggtgcagcacaccaacatggcacatgtatacatatgtaacaaacctgcacgttgtgcacatgtaccctagaacttaaaagtattaaaaaaaaaaaagatttgggtactttttgcctgactttgtgatctataataaggcatgaaagtaatttttagatcttgttagtgactcagctttcaaacaggtattttccactcctttttaaatcttctggctcagtttaattgaagaatactctgagactgcaagttgagctgtttaaatccagggactgtttgcactgtttacctgtgtgaatttgaattttgttaatatagggcaacaaaaacaaagtacacgaatgaatttggatagtaaggttgaaataagactataactataatctaaatttcagatggttatatttataaaaacagctatatattttcattgattgtcaaagtaactatacattttttatttttattttttaaatttattattatttttgaaaccgagtcttatactctgttgcccaggctggagtacagtggcgcaatctcggcttactgcaacctccacctcctgggttcacgtgattctcctgcctcagcctcccaagtagctgggattacaggcgcgtgccaccatgcccggttaattttttctatttttagtaggaacaggtttcaccatgttagccaggatggtctcaatctcctgacctggtgatacacccgcctcggcctccaaaagtgctgggattacaggcgtgagccaccatgcccggccagtcactatacatttaaatataaactatttaatatgctgcttctatccagcttacatgttgaggtccctgttgtcttttaaacctttttttttttttttttaaagacagttttgctcttatcgcctaggctgaagtgcaatggtgctgtcttggctcactgcaacccctgtctcccaggttcaatcaattctcctgcctcaacctcctgaatagctgggattacaggcacgcaccatcactcccagctaatttttgtatttttagtttcaccatgttggccaggctggtctcaaactgacctcaggtgatcgcccgcctcagcctctcaaagtgttgggattacaggcatgagccactccactcggtctgtcttttcaactttaaaagtttgataatgatggaatctataatcatattgtctatattttcactttctatgcagtgacggttgtttctaattattgccttaaggtaaaaaattaaaaaggccctctgagtcttcagaggaggattaaaatattctcagtttgtgttagtttttgtttgttttttgagatagtgtctggctctgttaccgaggctggagtgcagtggctcaatctcagttcactgcagcctccgcctcccgggctcaaaccatcctctcacctcagcctcccaagttgttgggactacaggtgtgtgccaccatgcctagctaatttttctattttttatagagacagatttttgccatgttgcccaggctggtcttgaactcctgggctcaagcagtctgcctgcctcagcctctcgaagtgctggaattacaggtgtgagccaccctgcgtggcttttttttttcttcttttttttttttttaaaagagacagggttcaggctggagtagtgcaatggcatgatcatagctcataactctggggctcaaacaatcctcccgcattggcctttcaaagtgctgggattacaggtgtgagccaccatgcccagcttgtgttagatttttttattctttggaaatttttgatttccagaatgaaattgctgatcatttaaaaaatatatatatacatatatgtgtgtgtgtgtgtgtgtgtgtgtgtgtgtgtttataagagtgaaatgtaggcatctataaagatgatcaagatatgatcaaggtcaaaattgttgactttctggagaattcatacaaagcccttttacataccacatcacattgcatttcactgaaagatggagggtattctagagaattgtattagaaagagaagacacatcgtaggccaggcacagtggctcacttctgtaatcccagcaccttgggaggccgaagcaggtggatcacctgaagtcaggaattcaacatcagcctgaccaacatggagaaaacatgtctccactaaaaatataaaaattagctgggtgtggtggcacatgcctggtaatcccagctactccggaggcagaggttgcaataagctgagattgtgccacagccctccagcctaggtgacatggcaagaccctgtctcaagaaagagaaaacacatcacagaagaggaagggagattcttttgtagttgctacgtgtgacgacagggtgttcacacacatgtgtaagatgtaccaccctccagccttgttacaatgtcgtcacattacccgaccgatgtgaaaaaaaaaaaaatagaagaggaaagcagtgccacaaatacaggaaactacattgagaaagttatatgctgagtagcttctattttctgtgtggagttggaggtcagctgaaggatgggatgcaattaggtggttttcgttttgttttgtttgttttgagactgagtctccatctgtcacccaggctggagtgcagtggcacgatctcggctcactgcaacctccgcccctgggttcaagtgattctcctgcttcagcctcccaagtgactgagactacagacatctgccaccacgcccggctaattttttttgtatttttagtagagacggggtttcactatgttggccaggctggtctcgaactcctaacctcgtgatctgcccgcctcagcctcccaaagtgctgggattacaggcgtgagccactgcgcctggccacaattagctatttaaaagggaaaaaaggaccagtctagacaacatattgagaccctatctctactttaaaaaaaaattaacccatcatggtggcatgtgcctgtagttccagctactcaggaggctgaagcaggaggatccattgagcccaggagcttgaggatgcagtgagccatgattgtgccacagcactccagcttgggtgacagagcaagacctcatcttttttttttttcaaagagtgaggaaaggggcccgggacaagtaaatgattcatcaggtggcagtgaatgactaccatatactatgacttgacctatcctaattctaaaaatataaatacattattagcagtattgtagataattgaatatcctgctcttcagtgcagagtaaaaactgctccatcaacaattggaagctatatttaatcagataattctggggatgcctattatgaatatgacctgattttaagggatcttcattgttttttagggcttgacttactatacagtggtcttcctttgtttagtttgctgtttcatgtaatctgcctgtatacttctgacacttctgataaataggtcttttaaaattactgttttcattcaattgctttttcttgccttgaatgtcctacatagtctgtttctgtttctagccatttctctcattattttaatgccacctgatttagagcagttttttttttgagacagagtctcgctctgtagcccaggctggagtgcagtggcgcagcctgggcccactgcaagctgcgcctctcaggttcacgccattctcctgcctcagcttcactagagcagttttaagtaataggaatgattatagcatctttgccttgttctttgacacaagtgtttctagtgttctgccattaactattagatttattggttgaaggtttgagagatttcttttttcctgatgttaatgaacattcttaatgaagacctttccgttaatgaggaatgtttaaaaatcaagaatgttgaatttgtttctgttttttgagacaagagtctcactgtgtcacccaggctgtaaggcagtggcgccatcttggctcactgcaatactccacctcccaggttcaagtgattctcctgcctcagcctcccaagtagctgggattacaggtgtccaccgccgtgcccggctaatattgtatttttagtagagctgaggtttcaccatgttggccaggctggtctcaaactcctgacctcaagtgatccacccacctcagtctcccaaagtggtgggattacaggcgtgagctaccacgcctggccaagaatgttgaatttgatcagatgtttttaggtaaacattgagatctccataatgtaccattctgattcacttggtccagctcagctccctgcctaggtaatacttactatttcctttaagtcctcgcatctcgcctttataaaaagattcttccattcagtctcatttctctcgtctttgaattaaatttcatagacttcagtagcttttattttgctcctcagataggtttacaagatcctaggaggcaagggaccatatataacttaaccttcttttatattccttggtataaaactggaaataacaagcactcatcccttcttcctctttccttttttctttacatgttttatagtgaaattttgctttacattttaaaaatataaatgtttcaaactattcaatacatgacagttgtattgtgtatctttcctattgtacaacctgactttgccttatgagtttttgaaataatgcaaaatatttttataggaatatatcctgagtggatctcacagttgtaaattatgctgaacaactaaggcaaaatctcctcctctctggaaacgtagctgacctctggcctgtagcaggccatgcagtttttttctaagtgtcagtcaataatatagtaactttaaaacaacataattaggagttcagctgggttagtgtgacattctctctccctctcccccaaccccctttctctcttagacctttaagtattttagttttcagtaatgttatttttcttaacaggttaaaagggtaaagagggaaacacagataaataagggtggaggctgaaaacaactgtttagtgactgccctctgttttgtgtttccattactcaagaaatttaatcgaaatacgagaatgaacagtaatgcatattttttgtttatttatttggttttgctttttaaaaagtgcagtgtgatatacttaactggtagatcatttttggcttttgttgcaactgtgggctggagggtatatcaggatgtcatctgagacccagccgtctgatgaaaagaaatggaatcgagcaggctagtatactgggtacagggttctttttgcttgatggggaagataaaggtccactcaccctgcattgcctgaattacattcttcttcactttgtctctgccatggataaggtctcattataacctcttgctgaacttgtacttgtcctaagactggtagtagttaaatcctgaactaccttttggaagtagttatcttagaatgtgatggtgaaggatggtaatggcaatcaatttgtcagacagatttcttagggtacgtgaggttggagaagtataagacctatggccaggaactcatcacatctgtgctgccctttccctgaagagtcagtagggtattgtagcataaaagtttaggaagtcttggctggacacagtggctcacacctgtaatcccagcactttgggccaaggtggacgaatcacttgagatcatgaattcaagaccaccctggccaacatggcaaaaccccgtctctactaaaaatacaaaaattagctgggcctaatggcacgtgcctgtagtctcagcttctcaggaggctgaggcaggagaatcgcttgaacccaggagggggaggttgcagtgagccgagattgccacactgcagcctggatgacagaataagactccgtttcaaaaaaaaaaaggccaggtacagtggcccacgcctgttatcccagcactttgggaggccaaggcgggcggatcacaaggtcaagagatcgagaccatccttgccaatatggtgaaaccccgtctctgctaaaaatgcaaaaattagctgggcatggtggcacacgcctgtagtcccagctactcgggaggctgagccaggagaatcgtgaggttgtggtgagctgagattgtgccactgcattccagcctggcgacagagtgagactgcctcgccaaaaaaaaaaaaaaaaaaaaaggaagccttggctgggcgtggtggctgatgactgtaatcccagcactgggaggccaaggcagtcaggtcacatgaggccaggagtttgagaccagcctagccaacacagtgaaaccccgtctccactaaaaatattaaaaaaaaaattagctgggcatggtggtgctcacctgtaatcccagctactcaggaggctgaggcatgagaatcacttgaactcaggaaacaggcttcagtgagccgagatcatgccactgcactccagcctgggtgacagagtgagactccgtttcaaaaaaaaattaggaagccttgttacctgtttgagacttgattgatatcctgtggctgcagcttagggaatgatcccctgtatatctctgccctggaaataaattttaatcacattctctcccaagactatatagtttcatcttgttatctaaaacagtatagcccggggtggtgtgagagatgtcttttggaggagggtactaaggatgactccatgtgtgcttctggtggtgtcatgcttgatactgcctggtcttttgtgttaccttcccagagccttcaacagccctgcagacatctcagatttgttgggcccctggaccttttagaggaatgcatgttatctccattgctgccctgaatatgcaagcttagccttttcagtgtatctttttttttttttaatttttattttactttaagttccgggatacatgtgcagaatgtgcaggtttgttacataggtaaatgtgtgccatggtggtttgctgcacctatcaagtcatcacctaggttttaagctccacacgcattagctatttgtcctgatgctctccctcccctcaacccccacccccaccaacaggcccgggtgtgtgttgttcccctccctgtggtccatgtgttctcattgttcaactcccagttatgcgtgagagcatgcggtgcttggttttctgttcctgtgttagtctgctgaggatggtggcttctagcttcatccatgtcgccacaaaggacatgatctcattcctttttatggctgcatagtattccatggtgtatgtgtaccacattttctttatccagtctgtcattgataggcatttgggttggttccatgtctttgctgttgtaaatagtgctgcagtaaacatgtgtgcatgtgtctttatagcaaaatgatttatattcctttgggtatatacccagtaatgggattgctgggtcaaatggtatttctgcttctagattcttgaggaatcaccacactatcttccatgatggttgaactaatttatattcccaccaatcgtgtaaaagcattcctatttctccacagccttgccagcatctttcgtttcttgactttataataatcgccattctgactggtgtgagatagtatctcattgtggttttgatttgcatttctctaatgatcagtgatgttgagctttttttcatatgttttttggccacataaatgtcttcttttgagaagtgtctgttcatatcctttgcccactttttgatggtttttttttcccgttctgtaggttgcatgttcactctgatgatagtttattttgctgtgcagaaactcttgagtttaattagatcccacttgtcaattttagcttttgatgcagttgcttttggcattttcatcaagaaatctttgcccatgcctgaatggtattgcctaggttttcttctaggatttttatggttttgggttttacatgtaagtctttaatccatcttgacttattttttgtataaggtgtaaggaaggggtccagtttcagttttctgcatatggctaaccagttttttgagcaccatttattaattaaggaatcctttccccattgcttgtttttgtcaggtttgttgaagatcagatgtttgtagatatgtggtgttatttctgaggtctctgttctgttcccttggtctgtgtgtctgttttggtaccagtagcatgctgttttggttactgtagccttgtagtatagtttgaagtcaggtagtacgtgtgatgcctccagctttgttctttttgcttaggattgtcctggctattagtgtatctctttaaatgggtctagtaagaaaacatctcagttcatcagcctttgacttaaccttgttttttcttcatatgagcaatgaaattaaaatggttacggaactcttagaactttttcattcttagaatgctagagtatacagtttgtaaaatactattattggccaggcgtggtggctcatgtctgtaatcccagcactctgggaggctgacgtgatgaaaccccatctctacaaaaaaatacaaaaaattagctgggcgtggtggtgggtgcctataatcccagctactcaggaggctgaggcaggagaattgcttgaacccaggaggcggaggttgcagtgagccgagcttgcgccattgcgctccagcctggaggagactccatctcaaaaaaaaaaaaaaaaaaaaaaatcttatgggtggtattgatgaggtgttatgactagtattacagctgcagaaattaccctaggggataaaaacaaatgaaaagaatgtaggaagtcagctaaagtgcttaaaatcgaatgctggcattttcataaacttgtaatagtttagaaaataatttcattcgttatgtttgtaatagtttgatatttaagcctaggctgtgtctagcttaggatctgtttgctcatggataaaagtccttcatctcagttttgattttaaccattttcttttttatttttcttaaccatttttatttttttaacctctttgtgtgtgtgtgtgtgtgtgtgtgtgtgtgtgtgtgtgtgtgtgtgacggagtttcactctgtcatccaggctggagtgcagtgacgcaatcttggctcaccgaaacctttgcctcccagattcaagcaattctcctgcctcagcctcccaagtagctgggattacaggctcctgccaccatacccggctaattttttgtatttttagtagagatggggtttcaccatgttggccaggctgctcttgaactcctgtcctcaagtgatctgccctcctgggcctcccaaagtgctggaattacatgcgtaggccactgcgcccagccttctctgattctttatagtattactggttttggtctactccattttacttctgtgtgaatttctctttaattctagtgactggtttcaaagaggtgaagattccatccttaataaagctgatgaggccaggtacagtggctaacgcctgtaatcccaacactttgggaggccaaggtgggcggatcacctgaggtcaggagtttgagaagaccagcctgaccaacatggagaaaccccgtctctactaaaaatacaaaattagctgggcatcgtggcacctgcctgtaatcccagctactctggaggctgatgcaggagaatcgcttgaacctgggagacagaggttgtggtgagccaagatcacgccattgcaccccagcctgggcaataagagtgaaactctgtctctaaataaagaaagaaagagccaagcgtggtggcgggcacctgtagtcccagctactggggaggctgaggcaggagaatggtgtgaacccaggaggcagagcttgtcgtgagtggagatcgcaccactgcactccagcctgggcaacagagcaaaaaataaaataaaataaagctgatgaaaatcaactctaggtcaacaactgagattagtagcaagccccagaagcaccctttaggctgttagaaccaagagttttgtgggtttttgttttgttttgtttgttgtttttttgagagagggtcttgctctgataggcaggctggaatgcaggggctcactcacagcttgctgcaacctcaacctgccaggctcaagccattctcccgcctcagcctcccaaagtgctgggattacaggtgtgagccactgccacctgctgaggttcttcagtctttacttaacttattacttttagtaacggtagtacaccttgctgaagttaaaggttctacattaactggatcagattgttggcttaaatattgagaggcagggcatcaaaggtggtagtgctaaaattctctggattttttttttttttgagacagagtttcactctgtttcccaggctggagtgcagtggtgcagtctcagctcactgcaacctttgcctcccgggttcaagcaattctgcgtcagtcttccaagtagctgggactacaggcgcataccaccacacctggctaatttttgtatttttagtagagatggagtttcaccatgttggccaggctggtctcgagctcccgacctcgtgatgcgcccacctcgggctcccaaagtgctgagattacaggcgtgagccaccgctcccagcctctggtcttgaacttctgaccttgtgatttgcccgcctcggcctcccaaagtgctgggattacagacgtgagccactgcgctggcctaaccctgtaattattatacgttgatttttggcatgctcataattacctggaacataaagtttttgctggtaattccctgttatctttctttgctgatttgttttaaacataccattgaattaaagccagtaatcccaccagttatacaatactactggagtgtgttttgttttgtattttgagacgtagtttcgctgttgttgcctaggctggagtgcagtggcacgaactgggctcaccacagcctccacctcccaggttcaagtgattctcctgcctcagcttcccaagtaggtgggattacaggcatgtgccaccacacctggccttttttttttttttttgagaaggaatcttgctctgttgcccaggctagagtgcagtgatgcggtcttggctcactgcaatctccgcctcccgggttcaagcaattcttctgccttggcctcccgagtagctgggattacaggggcttgccaccacgccagctaatttttgtatttttagtggagacggggtttcaccatgttggccaggctggtctccaactcctgactttgtgatatatatctatatctatctatcgctctctctctctctctctctctctctctttctctctccatctataaagcccaaaacatttttggtcccgagcattttgtataaagggtactcaaactgtagaaggcaaacatgaaaaggctaattcagcttctctaaccttcaagttctaattctaaatgaatgtctcattctacgacagtacactaagtttatactgtatgattgctttttttcacccactccaatggttcaaagttatttctaatatgaaaatactttagttttctcaaaacttttctctgcaaaactaaattccagctgtcagcccttgagtgtataacaagtggtaaagaaagactaaatgtaaatgttagcaaaattgatggttgctgtcacagagccatagcttgatctatagagtgcctacagcttgtgaggtaagcaacacatttgaaacttataaatatgaagtttctcttctgatgttaaaaaaaagaaagaaaaacttataactaagaatataatattatggatgtagtatgacaggggctaaaagttctggaggctttgcgggggtgtcctttttaatgaaatacttgtatgatttgaaagggaatactcttgaaaagagtatcttcagggttaatgagattttaaataaattctatttcttcagaatagaaatgaggtcttttttttaggagtcatttgaatttttctttcagaaatcgagctatagcagattatcttcgttcaaatggctatgaagaggcatattcagtttttaaaaaggaagctgaattagatgtggtatgttttactttttacaattcaaagtatagttaatgagtggattttcactcaagtatctgtagttaacagttacgcacaattttgtcatttgttattgtggtctacttggtactgaacttgattttcactccttttttttttattttttattttaatttttgagatggagtctcactttgtctcccaggctggagtgcagtggcgtgatctcggctcactgcaacctctgcctcccagattcaagcgattctcctacttcagccttccgagtagctgggattacaggcacgcaccaccacacccagctaatttttgtatttttagtagagacggggtctcgccatgttggccaggctggtctcaaactccagacctcaggtgatccacccgccttagcttcccaaagtgctgggattacaggtgagccaccatgcccagccactccctttttttataatcagatttttagtaatatttggacttaaagatgaatgatctttgtcttgaggatcatagttaagccattttttaaaaattctaaatttattttctctagaatgaagaattagataaaaagtatgctggtcttttggaaaaaaaatggacatctgttattagattacaaaagaaggtaactaagtcttttttctttaaaattagttgtattcagttatataaactttctgaaaataacattcttctgcattaattaataattgcatctaatctttaaaaagcaaataaaaatacattttttgtgcttcatgaaaagtatgacctaggcatattattgcagatacatggtaattcacatatctggagttgctgactgggttcaatctgcatagtcctgactttgaggaattgatactgaaagaactcatttgtgcacttagaaggaaagaatacatggagccattgtgattaatgctgggaaaagaacactaaaatgtgctcgtagacaagttgtttttatctctgagcttttatttttatctgtaaatacaacaaataatattccagtcctaaaatggatacttcataggcaaagttagaataagtaaataacattgttatgagttcatcatataaagctcttagaaaaatgcttagcacatagtagatgctcaataaatattagcttttattaatattattattaccatatataatgtggtttggaaagaacttactaagagtagcagccttagagggaccaagacaaattcactgcccttctctaattagtagaggactctgtcaccagatacaaatcgaaatttttctttttgttaaagagttaaggcaattgtactgaatttttctcaatttttagtttcctcacatgacttagattttgatgctgtacaaaataaataattttcatttaaatttgacaaatgctttggagattactgaaattttttcaagtatcctacatacatagttgcaaaataaaggcagttttttaaaatgtcacatgctatttttattgaaatctatctgtacgtaactacatgttctttttcaaggttatggaattagaatcaaagctaaatgaagcaaaagaagaatttacgtcaggtggacctcttggtcagaaacgagacccaaaagaatggattccccgtccgccagaaaaatatgcattgagtggtcacaggagtccagtcactcgagtcattttccatcctgtgttcagtgttatggtctctgcttcagaggatgctacaattaaggtaattttttgttaaaagcagacttaacgggaggctgaagcaggagaatggcatgaacccgggaggcggagtttgcagtgagccgagattgcaccactgcactccagcctgggcgacagagccacactctgtctcaaaaaaaaaaagcagacttaatagggtgaagaaaattaaaagatcctgaaaatgagggcctatgaagagggacaggaggtactctgaaacgtgtgatttggttctaaatcttaaaagacagaattggaataaaatatcattgtggctcctgagaggcatgctgccaggtaagtttgatggtgaatttgagaaagtcgggtgtcactaactgagttgatgtcagtacatcaccttgtgcttgaacaatttttgttcttggagaatgaaaagtgtgtgtcttacctttaaacggaggttatgtgtgaaatactgattgacaaaactagtaattgatagggtgaatctatactgcaaaagaattcagtagaggattcatttaaattgggctttccttgatgtatttaaaattggctttccaggagtgtgggaatatacaagcttttcattttataaattacgtatttcattaaaaaatttttttcacagtaaaaatattattaccttttaatgttgtgcttttttaattaggaaaagagttgtttttaagttgcctttgttccggacacaataaaatgaccgttgtataaaccacctacagaaagataagatagttgcaatataggtagatttaggtagatgcctctatcctaagggttatttcaaagtaagttacagatattaagtttcatttacaaaagtataaccaatcggccgggcacggtggctcacgcctgtaatcccagcactttgggaggccgaggcgggtggattgcctgagctcaggagttcaagaccagcctgagcaacacggagaaaccccatctctactaaaatacaaaaaaattagctgggcatggcagcgtgcgcctgtagtcccagctacttggaaggctgaggcaggaaattcgcttgaacccaggagacaggttgcagttagccaagatcgctccactgcactccagcctgggcgacagagcgagactgtctcaaaaaggtagttacaactaaccaaatagtaacgacggtttggccttactactaacagcagaagaaataaacactgaaattatgggccgggtgtggtagctcatgcctatagtcctaggactttgggaggccaaggtgggaggactgcttgagctcaggagttagagagcagcctgggcaacatagcaagacctcgtctctacttaaaattagccaggtatggtggtgcatgcctgtagtcctagctactcaggaggctgagatgggaggatcacatgagcctgggagttggaggctgcagtgagctatgattgagccagtgtactccagcctgggcgaagagtgagaccctgtcttaaaaacaaaaaaattggactgggcacggtagctcatgcctgtaatcccagcactttgggaggccaaggtgggtggatcatgaggtcaggagatcgagaccatcctggctaacatggtgaaaccccgtctctactaaaaaatacaaaaaattagccgggagtgatggcgggctcctgtagtcccagctactcgggaggctgagtcaggagaatggcgtgaacccgggaggcggagcttgcagtgagccaagatcgcgccactgcactccagcctgggcgacaagagtgagacacacatacatatatatgtgtgtcaaattgtcaaggtattttacctattaaataagaattcccagtgatgataagattttgataaagtagtcattctcattacatatgatacagtcttacgggatatcaatttaatagagtatatgaaggctttaaaagtttatactttttgacccactaattgtttctccccattactgtctgacctaggtattataaaatgaggacagaatttttttatattaaaaaatgttcactataatgttttctataatagtgatttagccagcaattagaattttttttttttttttgagatggagtttcactcttgttacccaggctggagtgcagtggtatgatcttggctcactgcagcctccgcctcccaggttcaagcaattctgcctcagcctcccgagtagccgggagtacaggcgcccaccactgtgcctggctaattttttgtgttttttagtagagacggggtttcaccatattagccaggatagtctcgaactgacctcgtggtccgcccgccttggccttcctaagtgctgggattacaggcgtgagccactgcgcccggccatatttcattttttaactcaaaatgacatatgctcttgttcatttgctattcgtgaacagttaacatcttctgaaatctttccttggccctttagatgtctgagttctgatggtctagtaggatcgagtattcatccattgttcctcaaatattctacatacaaatgcctgctatagccctctgaagctccttcccttccccttccctttcccctttctttccctttcctttccatctctttctctttctttcctcttatttcttccccttaagtttccttatttacatgtcattcctgctctgagacagggagcggactatgtcttgtgactttatataccttatcactattacagttggttatgtgatagaaaccttataaatgtggttctagagatagattttaataattgcaacattagttttccctgtagaaaaaaagaccaatttatacatgagatacaatatttctaaaatagttatcctttgttacttgttcggttagttactcagtaaggtgccagactggcctgctgagtgcaaatgtgaaacaagaaaggagtgatggagttggtgttaaccaattttctgttcacttgacaggtgtgggattatgagactggagattttgaacgaactcttaaaggacatacagactctgtacaggacatttcattcgaccacagcggcaagcttctggcttcctgttctgcagatatgaccattaaactatgggattttcagggctttgaatgcatcagaaccatgcacggtaaggggtagaggatagtgctttaacagtaatttctatcatggtacttcagaaggaatattgtttctaacagtgtacagtgttcctttattcacctcttaattgtcagtattggtggaagagcataccatgtagatagtccagggataagccacagtagttgagagtgctttctattaggaagttttaagtatcttttagtactttacataaaatatttgtatgagtatttcttggtaagaaaaactgccaggtcatttatctgtatttgagttaaaaatggttttgtttgtgttttaatttttgttagttgggaaactgaagtccagagagagtaggtcgagtgaaaacgagcccagattctcttgctcacttaagtgaaatgagctgagcgcacagaccccatgccctcgttcattatttcccgggtcttgttgtgggaactgttttctgaggcagtatgttttgtggaaagagagtaatttgctttggagtcagacacctgggttcaaattcctacttgtctacttacggtattagaaaatttaaacctctttcatctgcaaaacagaggtaataataccagagtcatagagttgtcatgaggataagatgaagtcataagataaatcatcttggtgtagtacctgccacataggagatgctcattacttagggatttttgttgtttctttatacatgatgacatttgaatgttgggattttgtacaaggaacacgttaacacatgagtaaactgtgtttacctagagggcataatttgaaggttgtgttttctctgtcccaaattaaatgcattggggaagtttataattacaggaattccacgcatgaacactgtttttttgttgttgttttttggttgttttttttttgagactgtgtctcactctgtcgcccaggctggagtgcagtggcacaatcttggctcactgcaacctccgcctcccaggtttaagtgattctcctgcctcagcctcctgagtatctaggattataggcacgcgccaccacgcccgtctaatttttgtatttttagtagagacggggtttcaccatgttggtcaagctggtctcgaactcctgacctcctgatctgcctcagcctcccaaagtgctggaattataggcgtgagccacgtaaggtctatcatttatttttctttaagttgcctgtatcttctagctgtaactttaaaaagagttctttctaatgcattttttttttttacccccaacaccacctttttttttttttttttttttctggagatggcctcttgctttgtcacccaagctggagtacagtggcacaatctttgctcactgcaacctccacctcccaggttcaaatgattctcccacctcagcctccaaagtagctggcaatacaggcaagcaccaccacacccggctaacttttttatttttagtagaaacagggtttaaccatattggccaggctggtcttgaactcctgacctcaggtgatccgcccgcctcggcctcccaaagtgctgggattacaggcatgaaccactgcgcctggcccaccattttaaacagagaaccaattccccattttttgtatccatttgctttatcttttttatatcttagaatatcaacctagaagctaggcacagtggctcacacctataatctcagcacttttggaggccaaggcaggaaggattgcttgaggacaggagttcgagaccagtgtgagcaaaatatggagaccttgtctctacaaaaaataaaatagttgtgggtgtggtggtaccagatgtggtggtacacacctgtgtagttccagctacccgacaggctgaggcgggaagagctcttgagcccaggagttcaaggctacagtgagctatgattgcaccactgcactttagcctgggtaacagagcaagtccttgcctcacaaaaaaaaaaaaaaaaaaaaaaaaaaatgtttccctagcgttcatatgtaaacattcagactcactgaggtaagtatatgaatatattcaaatgttgataatcgtgatgccttttgtttttaaaccatttgtacaggttgaaatttaatcctaaatggagttgactatttccttgtgggttgttgttttactgatttttttaactttatcgtgtaaatccaggtttcttatccaatttgtataaaatccagtgtatttagaacttgctttgacatagtgaaaccccatggtaaaatcccatggtcaattgatgtttcattgctcttggtggtatattacttcataatatattgctgttatgtgttttaggccatgaccacaatgtttcttcagtagccatcatgcccaatggagatcatatagtgtctgcctcaagggataaaactataaaaatgtgggaagtgcaaactgggtaagtaagtttagttgaaaaggcatcagcggccaggtgcagtggctcacacctgtcatcccagcgctttgggaggccaaggtgggcagatcacctggtcaggaattgaagaccagcctggccaacatgatgaaaccccatctctactaaaaatacaaaaattagccgggtgtggtggcgcacacctgtattcccagctacttgggaggctgagacaggagaatcacttgaacctgggaggtggaggttgcagtgagccgagatcgtgccattgcactctagcctgggcaacaagagtgagactccgtctcaaaaaaaaagaaaaggcatcagcttaaagacatatttataaaaaacaaaattgtgttctggtgttgcagtcacttcgactttaacccggaatgatcattatgacagtcatattaaatatactttaaaactaagtttgatctgtacatgtctcccaaaaaggagcacagagacattgtaaggagagactctatgtccttgagaagcatttctgtgtaatggcttatttcctctgtggtcttcttttaggtgatctctctgtgggtttaaattaaagtgtaaataatctttggccgggcgcggtggctcacgcctgtaatcccagcactttgggaggcagaggcgggcggatcatgaggtcaggagatcgagaccgtcctggctaacacgatgaaaccccgtctctactaaaaatacaaaaaattagccgggcgtggtggcgggcgcctgtagtcccagctactcgggaggctgaggcaggagaatggcgtgaacctgggaggtggagcctgcagtgagccgagatcgcgccactgcactccagcctgggcgacagagcgagactccgtctcaaaaaaaaaaaacaaaaagtaaataatctttgtgctggtatacctctgttaggctgaatttggttgtgcatagaattacacttgatttttgtagtacaaagttactagttttactcagattagtagagcatagcttttttccaatatggctggaaatacttttaagtgtgcatttagttttgaaagattttatttcttatacatattttatcttctagatgttgattttattagctccttaatgatatgtctgttagcttattgttcctactttaattaaccaggattgtacatttattctgtcgacttgcatctctaacttggtaccattctcttcatcccagtacatatttttatatcacttctgggaagtgtcctgatgattgtcattcacagtgtaagttattatttatattgacagctactgtgtgaagacattcacaggacacagagaatgggtacgtatggtacggccaaatcaagatggcactctgatagccagctgttccaatgaccagactgtgcgtgtatgggtcgtagcaacaaaggaatgcaaggctgagctccgagagcatgagcatgtggtagaatgcatttcctgggctccagaaagctcatattcctccatctctgaagcaacaggatctgaggtactgtatatacaaatgtcttcatggttttattgctgatatctgaagtccttagataactttgctaattccctgtttcagggctgttaatgcatttaaaaatctgcatccagcaattctgaatcttgaaattctctactcttcacagcttgctgatgtgtttacattatttaaccagtgatgattattgctgtcagcctatccttgatttgatacgtgatgggtattctcctaaagaattaaaatttatcagaaaaatcagtgttatgagatcatctcaatgtaaaacaaaacctgagggagaggttaaagttttctgtcagaaaaatagccttcattaatgaagataatgattttatttataaatttatggtaaaatgcagttcagtatttattttttaaaattaattccagatgtgatagtataaatgtttttttaaatgaagactaatccatatggcagcctctgatgttcttgatcatttaaaagtactagctgagcctggagttttaacgcatttctttgtgatctttatggttttggtctttattattaatatgttaaaaattacaaggtacagcggcacatggctatagtcctagctactcaggaggctgaggcaagaggatcacttgtgtccagaagttaaagttcagcctgggacaacatagcaagatccctgtttctaataaatgaatgaaaatgaatggtctaaaacttttgtttgtttttgagacagtctcactctgttgcccaggctggagtacagtagcgtgatctcggctcactgcaacctccgcctcccaggttcaggcgattctcctgcctcagcctcctgagtagctgggaccacggatgcatgtaccaccctgccagctaatttttatatttttagtagaaacaaggttttgccatgttggccaggctgctctcaaactcatggcctcaagtgatccgaccacctcagcttcccaaagttctgggattacaggtgtgagccactgtgcctggcttcacattgattttgacagaggcattcctatcatgtatttttaaaactacatgtcaataaacaaaggaggcagtttcctctccctctacccccatcccacttatttttctaaatgaatcttctcttgtgagttctctttattttgattggcccattgcattttgagattctgtttactgccctctggtggtggttacatgctgtatgtcataaatttgattctggtgtggtggctcacgcctgtaatcccagcactttgggaagtcaaggcaggaggatcacttgagcccaggagtttgagcaacatagcgagaccccgtctctacagaaaactttttttttttttttaaactcaccactatactaatgacggaaaaaattttcaaaaacttagctaggtgtggtggtacactcctgtagtcccagccactagggagactgagacaggaagattgcttgatcccaggagttcaaagctgcagtgagctatgattgttccactgcactccagcctgggtgacagaatgagaccctgtcttgaaataaataaatattccctaatccagatcaaaaaaataaataagtaaatttggttttggttggatttgtaaaagttaaattaaatagtgattacagaaatcttgaaaagtaaatttattatctgttggttttatgaaaactgagtcctaacctaaatagagacttctgttcttacattatctgagtccttcctgtgtagcataggtatggtgtgaaagacttgtgtatttcaacagataaaaacaaattgggctgggcgcagtggctcacgcctgtaattccagcactttgggaggccgaggtgggccgatcgatcatctgaggttaggagttcaagaccagcctgcccaacatggcaaaaccccatctctactaaaaatacaaaaattagccacatgtggtggtgcgtgcctgtaatcacatctacttgggaggctgaggcaggagattcgcttgaacccgggaggcggaggttgcagtgacccaagattgcaccacggtactccagcctgggtgacagagccagactccgtctgaaaacaaacaaaaaaccaaaatgcaacaaaaaaattggaaatatatatcattattagatagaagccatttaaagtccatacctaacttcttgtgtgggaaacttaatttttattatgttttctgtagactaaaaaaagtggtaaacctgggccattcttgctgtctggatccagagacaagactattaagatgtgggatgtcagtactggcatgtgccttatgaccctcgtaagtttgcataatcttaccatttcttttgcatcttcactgtttatacctttttggattaatgctttatgatatcttaaataatctgaattattctgggctttaaaataacttctttataaagatagttttcctttagcttttgttgttgttatagtgatgtgaaagttatttctctagaatgcagattctataaagaatctgtagagccagtcggtgtttgagggggagatgctgctagctcactgtatctttaaaaattgtgtaatatctcggccgggcgcggtggcttacgcctgtaatcccagcactttgggaggccgaggcgggtggatcacgaggtcaggagatcgagctaacttggggaaatcccgtctctaccaaaaaatacaaaaaattagctgggcgtggtggcgggcgcctgtagtcccagctactcgggaggctgaggcaggagaatggcgtgaacccgggaggtggagcttgcagtgagccgagattgtgccactgcactccagcctgggcgacagagtgagactccatctcaaaaaaaataaaataaaacaaatgtgtaatatctcttacggagaaaaagcagcattcttagagacctgttcactgttgaagatgtttgtttctctgtttcactttatttatatgaatccttttaactgttatacctccttgctcacatgatctagtttatttggcttatttaggagcatctgtatttccatagaaagatatgtcaatactagtaagggattgtggacattcctatgtgcctaaaggagttccaaggagatctgtggatgtttgtttagtagtagtttttataatttggcatccacatttgtttagagattttttaggtgctaatgataccttgaagtgattgtctctctgtaggatatgacagacatatgtggaagcatcttcaagaactgattagaaaatgaaactctcggccgggcacggtggctcacgcctgtaatccccgcactttgggaggccgaggcgagcagatcacgaggtcaggagattgagaccatcctggctaacatggtgaaaccccgtctctactaaaaatacaaaaaattagccgggcatcctggcgggtgcctgtagtcccagctacttgggaggctgaggcaggagaatggcgtgaacccgggaggcggagcttgcagtgaccggagatggcaccactgtactccagcctgggcgacagagcgagactccgcctcaaaaaataaataaataaataaataaaaagaaaatgaaactctcctctagtagtattctgagcggagttcagctataccatgttgctgttaagaaaagatgatatataattaaaataaagcaggccaggcgcagtggctcactcctgcaatcccagcacttttggaggctgaggcaggtggatcacctgaggtcaggagttcaggaccagcctggccaacatggtgaaaccccgtctctactaaaattacaaaaattagccgggcgtggccaggcgcggtggctcacgcctgtaatcccagcactttgggaggccgagatgggtggatcacctgaggttgggagttcgagaccagcctgaccaacatggaggaaccccatcgctgctaaaaacacaaaattagccaggcatggtggcacatgcctgtaatcccagctacttgggaaggctgaggcaggcaaatcactttaacctgggaggcggaggttgcagtgagccaagatcacgccattgtactccagcctgggcaacaagagtgaaaccatctcaaaaaaaaaaaaaaaaaaacccgggcatggtggcgcacgtctgtaatcccagctactcgggaggctgaggcttgagaatcgtttgcacctgggagacggaggttgcagtgagccgagatcgcaccattgccctccatcctgggcagtgaagtaagactctgtctccaggaaaaaaaaagaaaagaaacaagaaaaacatactcttggccaggcacagtggctcacacctgtaatcccaggactttgggaggccaaggcaggaggagcccaggagtttgagaccagcctgagcaacataacaagaccctgtctctaccaaaataaaagtttaaaaattagtcatgcatgatgatgcatgcctatagtcctagctacttgggaggctaaggcaggaggattacttgaacccaggaatttgaggctttagtgagccgtgatcatgccactatactccagcctgggcaacagagttgctgtctctttttaaaacaaaacaaaattttgcagtgctgtgctataactgcactatccagcgtggtagctactagccacatgcagctattatactcttgaaatgtggctagtgagactgaagaactgaattgttggttgtatgtaatcttaatattatatattaaagtaggcgtacatggacagtagctaccatgttcaactgtgcagttctaagcctttttctttaatgtgtagatgaatgtgctattttttataaaaatggtatcatgccccttaaggtagctttgtagcaaacctttaatttagaaagtatgtgatccttgcttatgttgttagatgctcttctacactgatctacagacaatgctttgtgaacatctttgctaactaaatctctgggcatgtccttaaagataaattgcaagaacagaactgctgcgacaggggaaatatggatggatagatggatggatgattaaatggatggatgattagatggatgaatgattggatggatggatggatggatgattggatggatggatagatggatgattggatggttggatggatagatggatgattggatggatggatggatgattggatggatggatggatggatgattggatggatggatggatggatgattggatggatggatggatggatggatgattagatggatgattagatggatgattggatggatagatagatgggtgggtgggtggatggatggatgattggatgattggatggatggatggatggatggatggatggatggatggatatatagatatatagtgaatgcctgtatatccttcacttagttaccatttgttggttttccttcatgtatgtgtgtatattttgctgaaatcatttgagcgttctttgcagacatcgtaacactttacccccaagtattttagcatgaaccacctaagaacaaggatagtatataaataaccaaaataaaattattcacactcaagaaatttaccattgatagactacatattgagatttgttcttgttatttccataatgccctgcgggacttctttttaaccctcatccaggacccagtcagggatcgtacgttatattcactcctcatgtcttatgagttttcagtttcctttaatctagaatcccctagacttttattttcttctggtcttttgatgtttttggtatgtatagttttatcgtattatgaaatagatgctatttaaacattttgccttttactgagtcaaataacttttttgtttttaaggtgggtcatgataactgggtacgtggagttctgttccattctggggggaagtttattttgagttgtgctgatgacaagaccctacgcgtatgggattacaagaacaagcgatgcatgaagaccctcaatgcgcatgaacactttgttacctccttgggtatgtacgcctcgcgaggtctctgaacattagattttggagtgccagacaaactgtgttttacataatcgtgtggactttgccaggtaagaaatgactgtgctttcagggcagaatagagaagacatgaaaatcttgtggattcctaccatttgttttaaattctcctttcccgttaactctttccatcgttagccttataataaaaacattactttctccactgcacaacattggttttggaaaccacaatttgtgaagaggttacttaccactctgatgggtaatttttctcccctattagtttgtttctcaaacaaaatcttcctcaacctttcccactggcaggtgtatactatcagatactagaaactcagaaaattgtatttgatttgagtaaacatcctcactatcatctggacttgaatctggaatttaagagagtgaatacagtcaagtataataaatgcactaaagtataatggaccaaagcctgcgtaaggtgggctaatacctgcctcacaggattggttcaaggattaggcacaaatacggagcatttatgccatgcctggaacatcgtgttcagtaaatggatatggcgagactgtgtattgttagatttgagccctgctgtgccttagtcccagctactcaggaggctgaggctggaggattgcttgagcccaggagttctgggttacagtgtgctgtgctgatgggatgtttgcactaagtgcagcatcaatatggtgacctcctgggaacaggagactcccaggttgcctaaggaggggtgacctggcccaggtcagaaacagagcaggtcaaaactcccttgctgatcagtagtgggatcgcacctttgaacagccactgcactccagcctgggcaacatagtgagaccctgcctttgaaaaaagaagaaaaaggatttgagccccatttgggatgggccaaagaggaacaggcgtttttattgagatgttaatacaggatttgatcattgagtctcaacttccctaactgaattggcaaactagataccttcttgggttatggtatattagagaaacacgaaaactactggcatttggactttcttagaattttgtggctcattaaaaattgtatctggctcagtgtgatggagggttgggaccgggcagggtcttgctctgtcacccaggctggagtgcagtggtgcagtcatggctcgctgcagcctcgacttcccagctcaaacagttctgcatcagtctcccgagtagctgggactacaggcacacactaccatgcccggctaattttttttttaattttgtattttgtagagagggggtctcactatgtttgttgtccaggcttacgtgtgagttttaaataaaccatttctttttctttcagatttccacaagacggcaccctatgtcgtcactggcagcgtagatcaaacagtaaaagtgtgggagtgccgttgattgtgtctccttcggcccctcctccctcttttcctctggatgcactctgatgataccatggttaccccattgagctctgtttaaataaatattgtcctttcatgtaaattattctggatgtagattgagcttattaaatgttacacacaaagtattcatgcatggtgaatccaaattgtatactgtaaatttacatacgttgtctagaagtaccatagggtttaaaaacctgggctggcattggtcacaccaggcctaagaaggcagaagttgaatcaattgaactagggcactaaactgaatagttgacagtgtcattttatgttggattattaattcctgtttttctttctgctatctgttggtgcctgacttgatggcctcatttggggaaaagtggtggttattagggctttttctgaaatgtgtatctatgtaacatcacttaagtgtgcttaataaatcttctgtaaggattttagatgataaggctacaattcagaatcttctgaaccatctatgtaatgaatggggattatacattggaatttttgtcatgacacatttgccaaatcagtaggatatatttgttttggcagcctatcacgcagaggctagtggtatatttatgtaagaaaatgactgtaaatctcaagaaaaatctcagcagctaatagcaactcatttatttcattttggtcttaatgctttgtaaacaggtcaaaaaatactgtcatactctaagcttctattttccacactggacatacttctagttgtattctccatactattagactgtgtagtgatgtgacttccaagtagaatttaatctccccattgagtgtgtcatggtacaaatcactattcgtttttggtgttttttagggatgtgcaatgtgcattacataatgacagaaatactgagaaggttctgtgtgcccatttgaaaggagtgggaggaatacagcagtttgtttttcaacatgaatctgatattgatttaaactgtgtttcacttacaagttttaaaaaaatgacagggtttaatggagcgtgcataaaaatgtactgttttcaccttttgtttatatgtaaatgtttgtaagtatatgggcctatctgtaagtggataagtctgtatgtgtgtatcatacacatcaacctccatgtccttagtcctgggtttttgaaaaagtgctaaaacggacaagtagaataaatgttgctgtggaatgccatgctttagaacaaaccctttttgatcttaatgcttctgaaaactaggtctgactctggggatttttttccagccgaaggaaaatcacttccgttatgtccccctctaatttagccgctcgacattttacacaacccggatatgttgtatattttgacccaaagttacaggtaggtttaagagaatttttagccatgacttttggagcactattccattgtcagttattaataaagaattccattgcttagctaaccaacaggttttttttgtttccaagagagttatttgaaaagttaacagaacaatgagataacagtgacagtttaacaaagataaaattctgaactgcgttttattcatttgtgtactatgtgattttttaaatgtcccctttagtatttaatggaaaattggttcctgcaaaagacaaagggtgagagttagcgtcctgtagatacacacagagactaggccgtatattaactagaagcagctttatgtctagcttgtgtctttttgtttgtttgcttgtttgtttttagattcctgagagatgtctctggaagggaaagttttgagaactaatggctatttttgaggacaaaaattacatcttaagctaattccttaaatacatacagtaggtgaattttcaggacaatattgcctcacaaccctgcttacattgaaaagtctttttcccttagctcttctgactggatttttctacaaaaactatggaaaatatctttgttcttgtttgctgctattttctgtcctattttgagaaatataaatacatagaaatggtgcatcttaacatttgtttgtacatgtataaatgtcttgtattttaattcatttttagcatgaattgtttaagggtaagccacaacatctagaaatcactcatagatattgaacaataaaggagaatggtaccgatgcaggaggaagcaagcgtgtcttcccctgcagcacacagcgacttgcgttgacaaaggaggaggaaacgattactctgtaaacaaagttatccttacttgggagattgccacagcctgctgctgagttgagttaccagacatcctccatgtgagaagcagcgaacattgaatctcagggatggcccacaactgggtccacatgtaatgagccctgtttaataacgaaggggtgggggagagcagtccgtctacaacctggaatcagatttgcaaaatttcctgcactgctgtctgacactgtcctgttgatgccctttctgactgtgttctctgttttctctgtctgctgtctaaccctgtgccttgcctgggataaggacaatgatgaggttactggtttggattgtaagtagaggacttttattaattggtttagaggttcactgctgctttgtcactttctcaatcaaattggccacttaagaaataaagagctggtagaattgcatcctcagatgattattgactgtgtgtgtgtgtgaaaacagacattccagtgccacccaaatatatatctgtaacgtgcccaagaaatcctagctgcgctcttgagagtgcatgccatggagactggtttagacaccgcgtggagcctagttgcctgttgtcacggcatcttgcactttaggagactaagaccgtcctggttcgtctgtgtgtggtgtgaccaatggtgtgcccagagcactactctcaaaatcactagtgttagcaagtcgtcccgggctggggagcgttcgccgtagtctttggaagctttggctttagatttaccaagccccgcctccccgctgccagtgccctgctctcccgttcgcctctttctgtttctgtgtgaactttcccggtaatatcactcgttaaataggttttctttaaacttaattaaagaaaaactatttaaaggtaaaggatattttgttgacatcggtggctcgatcatccttaagcaactgaagttaaaattgttgaaggaaaaggcacttaaattggttactttcatgtccagctgtatataagtccagtgtgttcatctagatgacgcaaagaatctcctggtagagaagcgacatgtaaaaaactggtggaaaaaggttttggattttttttccagtggggtggggggagggcaagctggatttacaggtcacggctggactgaatgggcctttttatcttcccactgtatcatggaagtagctgcttgcttgtactgtccatccttcaggcatccctaaagctcactctgaagatgttagagacaaacacaaactcttcgagttaaagttgatcctgacactgacatgaaggcaagccttgatttcgtatgaacgttgctgaagtggtaattgaggaaaacagttccccagattgttaagagttcactgaagatattgacacaattttaaaaaatcagtaaaggaatgtatataatattgctctcgtgttttacagtaagatttgttgctctcagactgtgtaaaacaaaatttattcatgttttctgcatattaaaaaatcttattgtaccaactggtaaactattaaatgcctataaaactagatgtgatttttttttttttttttttttttttttttgtcttcctttgcacaggggaaatgctgatagaaagtggggctgtgtgtagctccagtcacaaagagtgacacgaatcggtgtcagggcagtaaggcctcatgagctgctttccttcagggcagcacccgaactggctttgctgtcccccttcccccgggtggaggagggagtgcctcagcctgagccttgccatggcatgcgtctgcggcacaggcccgctctccccaaccctcccagcagcccgttctgactgtggctatcgctgtggccagagagccaaagccaggatggctggttacaggcccaagactagactcttggggacagagtctagagataaggggccctgccgggcgcggtggctcacgcctgtaatcccagctcttggggaggcagagacgggaggatagcttgagcccaggagttcgggacctccctgggcaatatagcgagaccccgttctccacaaaaaggaaaaaaaaaagatggggccctaccccctttgttctgttagcctctaatcttgctcagtggtcttggaatcataaaagtaaatccttaatactgttttcgattttggttgaaacatacaaaataagagtgttcatctttgtcccagaaaccccagctctgcactttacacatggctgtatctgtggtgtattcaaggtgccctacaaaggacagtttggtgatgtgctggttcctttcttacagcccagctgttttcctgcctcctattgggagtagtagcctgccccaaaataggagcttggcccagagcaaaaaaggaatgggccatgcgcagtggtacgcctgcaatcccagcaatttgggaggccgagacgggcagattgcctgagctcaggagtttgacaccagcctggacaatacagtgaaaccccgtctctactaaaaatacaaaaaaaattagccaggcgtggtagcaggtgcctgtagtcccagctacttgggaggctgaggcaggagaaacacttgaacctgggaggcggaggttgcactgggccaggattgcaccactgcactccagcctgggcaatgaagcaagaccctggctcaaaaaagcaagaaaaaacaaagaaattggcctgaagttagttccctgcacttttgcagcttttccatttccttgcaagactcttccaggctgagatccagatgatagggccccaggggcagagttctagcgttagtatcactatccagaaatgctgttagctgttcaaaacctggcaagtaactcgctggcttgtaactgcctcaaacctccttccaggagtcatgactgtgtatggcctttgatgcagggggagggtagctggctgtggcagctctgtccctgcctagcctggtgaaacctgacttgtgtgcagacggttcttaactgctgatacaccagaagctctaggacaggcatcctcaaagtgtgttccctggttcagcagagcagcagcacctgggagctcacgcctcagaacccctgagtggaagcggtgcagcctgcttgcttgcttgattcacaatctattataacaagcccttccaatgactgaggcaggctcaggttcgagaaccaccgagctaaatgattcaacttctcaccaaagaaacttgggcacatcactggtctcttggccccgcagctcaggtctggatcccgatctttcctctttcatccttttatttatttttattttttgagacagagtgtcactctgtcatccaggcttgagtgcagtgggatgatctcagctcactgcaatctcttcctcccaggttcaagcaattcttctgcctcagcctcccaagtggctgggattacaggcgcgtgccaccgtgcccggctaatttttgtatttttagtagagacagggtttcactatgttggccaggctggtcttgaactcctgaccttgtgatctgcccgcctcggcctcccaaagtgctgggattacatgtgtgagccaccgcgcccggcctatcctcactttgaacatgtggagtttgtccctttgtgacgatgtcctatgatcttcattcccacttggtcacctgaccttgactgactctgtctcaaaaataaaataatggcttactcccacaaatgagggcatttcacctgccattcgaggatggctgggcctgcactctgtggggaggggggggtcctgattgatttggtagtttagaccttagaggtaggggagaggaaaatttgggccacatcaggatgccttactctccagctgcaggatatataggaatttccccaatttgtgtatgtgggtgtgtgtgtgtgacagtctcactcttgctgcccagactggagtgcagtggcgtgatttcggctcactgcaacctcagcctcctgggcttcaagtgattctcctgcctcagcctcccgagtagctgggattacaggtgtccgccatcacatacctggctaatttttgtaattttagtagagatggggtttcagcatgttggccaggctggttttgaactcctggcctcaaatgatccaccagccttggcttcccaaagtgctgggaatacaggcgtgagccaccacgcctggcccactttttaaaaagttgaaacctgtcacctaaaagaagggaaggagaaagagtggatttcacacctagggcctccatttgctttatgaaaacagccccttgtcatttgggtcgtcaaaagatgtctgagggcactaatacgcttaaaggatcagccaggaaataggggcctctcaggtgacaaggaggcacaaccctaaccaaccccgatctgttctcagcttcacaggaggccctgttttgagaggtgcatgaacatgtggctcacgttcaacaacaaacactcaggagaggggacagaatgttcaggacacaccggtgagagcaaaggaagctgctgctgggctggggctgctgggaagtctgagaggttctgtagcaggacactcactcgctggtggctgtccccgggtgtcacctaaaaccgccaggtcagaagcaccttttctccggttggctcaggaaaactgacagactcagggatggaatttttttcttttcagaatttccaagacgtacagatctctccaagcatcccaaaaggcgtatgttcctggtggggccgagggcctgctcttggagacagatggcgagcagcggtcagcagctactgagagctcaacttcccctctagagacaggctctgccgctcaagtccacctgggtcttggctctctgaatcctgtccgagggtggcgaacttgaggccctcctccctgcccccagtgtctcacctctgggcagtgctgcccaccctccttcctacctcgagtgaagagacaggggcaggtggccagccaggggggtgttcagtgacctcacgggtccagcatgcacagggcctggccccacagcccagcacccctccccacctggccttcacagtttcttctgcacctggtgacaggtgacattcacctgcacgacactcccgcgaacctggtgacggactggcagctcggtgaattccagctgagtgcctgtgattccacccccttacctcccactcaagtgacaatgtaagcgtgacctcgaacttgacctcgtttgtatctattcctctcccagtcacattcctgtcagccctcaccatccacccagaccgggttacagaacacacaggtgagcctggggccgcaggtttcaaaaactcactttattccaatgtgaaatgaggacgtgatggtttaaaaacaagaaaaagttcttgctcagcggtggggatgctctgcttgcccgctcacgcccatcccccttgaaacaaggtgtctggacggaccacacccataagcggctctccgcaaacccaggcagacgcccgtctcctccgggtctcagggtggccacatcctcccccaccagggctctgacagcaggcacagagcagcagcacgggcagggtggagcgggagcagcgtgtgggggcccccgccacccccagagctagtctcagaccaggaagggagctgggcaccagagaagcgacatcacgtcggcacctgtaactcccgggatccgtaattgggccccgcttcccccagcctcgcccccggcccactgtgcgttcggcagctcaggttaaaactgaggggagggatacattcagaccgcaggccccaaggctgcgcccagctgggtgcagggagtagggagccgagtcagagccacccactgggctctgagggcccagcaagccaaccccgacccctccgttcgggagcagcagccagaccacgccagtcacaacggcggctcccgtcccgccccaaactaaagtgcaccccagccctccagccccgccacagagctccggctccccacccctccccaccgggtttttcggcctaaaccctgaactttcagacaggctgggcccgggggtggtggcagccaaagcagcagccatcatgtcgaccatacaaatgacctgagaaatcccgtctgcgcgtcacccactcaggagtcacccactcaggactggctcgggctatgtacaggggagaggaacggtcaacactcacagccaggggcgcactcgcacacgccggccggacggcgggggccgaagcaacacctgccccccagccgggaactgatggccgcacacgccattcacgtgtctccaatggggcctctgcatcatctattcattgaaccagcgcaaaaacaccttctgcggggcaggcaggccaggctcccaggaggacacgggggtggggtggggtgagacgtggaggaagagggccttgcttcctcttccgcccgcaggctcgcccccttctcccgcagtcgggctccctggtgacggggccgctggctggctgtccgtctggctccctctctatccctgcacgctcggagaagggtccttggcagccgggggctgggagcccaggtctcctggggcccccgctggcgcgggctcggtagccatgggctcctcggctctatccctgtttctgctggcctcctggagctggtgccgccgcgccacctcggctttcagattctccaggtctttttggctgaggataagggtggggatggaggtggctctcagaggagtcctgggggctccacccgcctcccggctttcctgtgggataagctcaggctctgcgctctattcagtggggaatgtgtgtgaacaagcgcttccctcctgaaggcggaaggtccctgaacacggagaaggtaaggaccccgcacctgacccggcctcggggctcccctcgctgccctcggtggcctccctccagcgcagggggaggaaagcggagttggggggctgctgccacgccttgctgaccaaatccactccccacaggaggccacactgcttgtggccaccccggggagcccggggcctgctcctcagcccccccccgccgcaggatgggaagcgtggggagggaatgaagccgcttcttagggactggtgggaaaacgccaagatactttgtgtgaagcagaaacaccaaggtcttcactcgcggaatgcgaggatgctggggaagataagcggggcgggccgggcgcgatggctcacgcctggaatcccagcactctgagaggccgaggcgggcggatcgcaaggttaagagttcgagaccagcctggtcaacgtggtgaaaccccatctctactacaaacacaaaaatgagccgggcgaggtggcggacacctgtaatcccagctactggggaggctgaggcaggagaatcgctgaacccgggaggcggaggctgcagtgagccgggatggcgccgccgcactccagcccgggtgacagggcgagactccgactcacaaaaaacccccaaccgggagacactcgagtggggcggaggcctcacctgagaggaatgaagaggatgccgttaatgacgttcagctgctccaagacgctggccatgctgggggccgtgaactgcggggcggggaaaccagcggtgagcggggctcccgcgctcgccgggccggaggggccgctccgccccggactcaccttgaggggcgggatgttggcgctggagccgttgcggtagatctcgttcatggtgcgctgcagggccacggcctgctgggtcaggcacttgaggtactcggagctttccttggtcttctcatggtcctcgcccagctgcggggaggcgggaagggatcaggcccccccgtgcccccgcggccccgcccccgccccgccacgcccccgccccgcccccgcccccgccacgcccccgccgcgcacctgcgtcttgtagatggtgtaaccctccttctcgtgctgcagggccgaccggaactcagctttgctctcgtagactcgggcgacaaggtggtggctgccgggaggcgcggcgcggggcgagggaagggcataagtgggctgggtgtgggggcctgactcgggggcccggggtctcccgtagatccctccctggaagccaccgaggggaacagcaagtccagggctcagggaagagggggaggtcgagagaaattttctcgggtggaggaagacaggagcactgggtctcttccccgcccccgccggctgccccgcaggcctccgccggccttggcgtttggacgggcggcccctcacctgagggccaccttgagggccttgggcccgtggtacttggtgctgacggccagcgcgttctccaggaagcgcagcgacaggtcgtactccatcaccccgtgcagcaccagcccgatgttgttctgggggcaggcggtggggggccctggtcagctcccggtcccctgggatggagctgggtccctgccgcccccccgccccagcactcacgtccagcagcgccatctcggggtggtcttccccgaacaccagcagcatgaggtagcgggcgcggtacagcaggctcagggcggtggacagctggctgctggcgaagcagtacagggccaggtgcatctgcgggcggggcggagacaggtcagggtggccgcggacccagcccctcgcatcccccggcgcgggcggcactcgcgactcacgtattcctggatggtgttggggtgctcggtgcccatcacccgctcgctcatcagcaccgccttctgctggttactcagggcctggggagagacagtggtggttgccgcggcgtgggaacccccactgcacccagagcccgcctggccccggcccagcagcccacggtgccgctctgcaggctcctgtcccctccggctgcgcccagcacagtgcagcaggggggagggggatcagcagcagctgctgccacaccttgaagggcaggtcacgctccacagagagctccacacacccatgtcttacacccaacaaaatctccacaaacacccaaatacaaacctaaaactactaaaaatgttacaaaaaaaaaaaaaaagcctgagcaggggtgggtcccttgaggtcaggagtttgagaccatcctggccaacatgatgaaaccccatctctactaaaaatacaaaaattagctgggtgtgctggctcacgcctgtaatcccagctactcgggaggctgaggtgggagaatcgcttgagcccaggaggttgaggctgcagggagtcgatatcacgccactacactccagcctgggtgacaaagcaagaccctgtctcagaaacaaacaaacaaacaaacaacccacccatttataaacagaagaaaaaacagtccctttgcagggagtagggatcctaagacatgctaaccctgaaacagccctggccaggcagggcacccagaaccccaccacagcctccaccagccccggccaggcagggcacccagaaccccacagcctgcactgggcacagaggacgtgggagctcggtggcatgcttcctgcccactcacggagtctcaggaggcgtccttgctgacgccctgtgggggggtcccctgccatcgcctcccagaactgacctcaccgcagcacagggtgctcctgagctctcccgctcgggacacagttacagaggggtggagccaggggtggcctgggcagaaccagcgacttcctggggtctccctggactccacccactcctccgtcaggggccccctcactccccatcccccaacacgaggccaggcctttgctgccacagcccagagggtacctctgcgtagtcgcccatgatgtagtggaggcgggcgaggaggcgcaggcaggcgcaggtctccacgtgcatggctccgtagacgttgttaaacaggttcagggcctcattgatgagctcacagccctccttcaggaagcctgcagggcacccccaggggtggcaaggtcaggacgggccatggggaacccccacctccacccagccccacctggccacacaccctgctgcactttggcctgcccgctctggaagaaatggaaggcatccgaggccttggggttgacgtgcttgaccacggggaagatgttgagcacgtcctcctcggtgaacgcgggcttgtggcgactgtcgaagctgtactccttcagcaggacctggggggcagcccccccaccacaggaagcctcaggcccaggttcagcgggttggcacctcccaacccaccaacgcttgcgcacagacggctaccgtgaaaaagccacttcccctgtggccctggccaggagtgggagcctgcagcagggacgcagcggggacacagcggggacacagcggggatgctgtgagccatgcccacctggatccctgttttcagcgagatctcccgcaggagcgttatcttctgcaggccgtaggtctccacagcctggtccacggtctcactgaggagggagcagggggcctgagcagcccaagcaccgccgggcccccccaacaccgccccacccagctccccaacgctgtccagcccgggcccccaacactgccccacccggcccccgggagcctcccggctgccctcaccctccagcacccagtgatctccacagctgctccctcttctctctgactccctggcctatgaccacaggccttagacgccatctgggagcaggtggtggccgcctcatctgcccaatcccacccaccccaccgcccctgccccgcacgcaccactcgaggtcgaagtcaaagtagttcttggcctcctggcagatgttcttccagagctcctggggggtcatgacagcccaggctgtgttatctgcagcccccgggggccggtttttcctcctcttattccgcttcttggagaccagctcgtcggcgggcaggtgggccacggggtttgggtaggagctcaggaagcagttcaggaagtggctgatggcggctgagaggccggagagctcgactccctgcgaggcaggttggatccgagtcatgagggccctcagccccacctcaggctctttcccgacgccccacaccaccctgggaggccatggccagccgcagagcggacgggtggcacctgtaagtacgtcttgaagatgtgcttggccgagcgggtgatgagttctccaatgccgattttctggaaggattcagaagggaggtcttggtcaggcccccggcctccatcccagtcccacagctcccgttccgccccaccccgggcagcactcacaaagacgtggtccagctggtggcgggccgggctccgcagcaccagctccagcaccttgcccaggtagcgcatgttgatgccccgctggcgcatcacctctgccagcgttgccccgtccacgggcaggaccgcgtgctccatgcagtccttcacctgcgggctgcagcagctcaggcccccacccagctcctctgcctccacccaactgagtccttctgggggagcacagctatcctgggaggccctggagaaggaccccgaaggctccagctcccagtcaggatgtcagaatgtgcccagcctctggcaggagcgcaggccaagaaccaagagcccggtggtggtacaggccccctctaaccatgtgggagaagcagaggtgcccgcttgggggcactacttgacccccagccccgtgtcctgaggcttggaggccacggtgttgggggagcacccagcatcctggaaccagacacagagcctgcgggaggaggaggaggatgggcagcccccactgagctctggccccgtcccccagccatgccaccatccagggctcagaagactggattaccagctgccagcccacacggtgggctcagcagggcctgtgcccttgacctctgggggtcaggctccccatctgtcaaacggggatgcccactcagggaaagctgaaaaagtcactcctgcgagcctgtgttcatgggcctccaagtcggagacagatgagggaccagcaccctccacacaagccccacccagccccgcagcccctccctcaccaagccagggatctggcaggagagcaggaaggcagccgcgtccttcagcagctgcttctggtcccgaacttcatcctggcaggactcagggaaacgaacccctggaggagggagagcagagaggctgagccaggcagtggcaagacaaatgccgcctggcgctggcgggggaagcgctcagatgggggacaaacccaccagccccaagggcccaggccccccagcgaagctctggccctggagggctcctgcgctggccggcccccaccacctgcctggtgagaagatgtcaggattgaagcgaatgtcgaaggcggtgctgctgatggagccgaccgccttgcacgcgttgcggatcacctcccggctccgagggtctgctgtggagacatggctccatgagacacgggtcccctctgccaccggtggagctgggctgcgccaagcctcgccccctagctccttgcagagatgtctgccagcctctcccaggtgggggtcataagccaccctggcagggccagcccgggctctctcccggccatctgcagcagccccacctgtgccgtcgtctgcggcgatggtctctgccagctccttcaccttggccaggccgctggcgctgctaccctcctcctcacttcccgcctcctgtcctggaggatcctcagacttggactccaaggaggaaggaccaccattttccagggaggagggggtctccagctggctggcgttctgctgcatcagctgcaaggcggccagcttcataaagaggaggtacctggagcagaggaaacagggcagagcaggagctggacatcggggagaggagctctgctggcccacggctcccggcagctggggctccacaccccgcaggcatagggcacctcctggccggtgtgcatgagtcaacgcagaaaaaccaagatctcccaagacaggaagaaaaaggcggccgggcgtggtggctcacgcctgtaatcccagcactttgaggacgaggcaggcagatcacttgaggttgggagttcgagaccagcctgaccaccatggagaaaccccgtctctactaaaaatacaaaaaattagctgggcgtggtggtgcacgcctgtaataccagctattcgggaggctcagacaggagaatcacttgaacccgggaggcagaggttgcggtgagccgggatcgtgccattgcactccagcctaggcgacaagagtgaaactccgtctcagaaaaaaaaaaaaaaaggcagctgcgttctggagggtatgggaaaagaggagctccccatccaggtcagggctctcaacagtgacaggaagccactggcatttgagagttactcatgctgtgggacctctgacatggccatttccccatttcctaagcactaaacaccagcggcggggacccccggtgccccacctgcccgccccagcacggggacagtcacagccacccagacttccaagtgctccttaagagaacagtgtccgccacagccacattacccgcctggctgctcgcgagtctgcagcccgggtttctgcgctcgggagcctgacagcagggcaggtggggacgggtctccaatgactgtggctagacggagcccttcttcactctccagcgcttctcccttcaaggacccaaccccggatccacccagggcgcccgcactccctgcagctggccccggccctggtccggcagggccgcccctcacctgtgctccacgaaggcgtccaccagctcctggcgcaggcagcagagcttgtgccggtgggcgcgggggaagccggcgcgggcgcattcctcaggcagctcctcgccaggcacgggcaggaagttgaggtccggggggaaggtgcgcagcaggtcgaggatgtagtggcgcccgtcgttgccaatgatgcccttgcactcgaccgaggagcagagctccacctcctcgtcacggtcgttgagcacctggtgccgcaggatcttgaggggccgactcgtgcgctccagcagctccaggtaccgcgggtgtgacaccacggtcttgccgaagtcgatggagccgtagatgacgctctgctcctggtcccgctccaggatgccggggatgatggactgggccgtgacccggtagccgcggtaatccaccaccaccgtgcccagcgtgtacagcccctccacgtccaccgcgttgtacgtgcggacgccattcaggtcgttggtgggcgccacgtaggccgccacgtcccccccgaagtccttgtagtggtctcggacgtcgaagcccaggctgaagaagatgttgttccagatgaacatctgcatcttggtctcctcgctggggttgatggccatcacgttgccgtcaatgacggccatggcgcccctggtggctgccgcggtgaagtcgctgtgcacctggcgggggtcgaggagggcagggttagaggccgcgcccacaagagcctgcatccacctggccaagcgcacgcacctagaccgcggaggcaaccgggcctgccttggaaacccaaggacccggagcctcagtttcctcatatgtagaaaagggcaagaaaaccatgttttggccgggcgcggtggctcacacctgtaatcccagcactttgaggggccgaggcggtcagaccacttgaggtcacgagttcgagaccagcctgaccaatatggtgaaaccccatctctaataaaaatacaaaaaaaatcagccaggcgaggtggcgcgcgcctgtagtcccagccacccgacaggctgaggcaggagaattgcttgaacccgggaggtggaggttacagtgagccgaaatcacaccactgcactccagcctgggggacagagtgagactccatttctaaaaaagcgcaaacaaaccaaaacccccatgttttgagaatacacttgtgctgagggagacagcagggcttagtgattaacaagcgtgcgcaggtttgggatccaccagttatgtgccaggtgaacttgaacagataaaggtattgacctttacaagttgtccaatatattataggaaatagtctctataacgcacttggcaccatctctggtgaagtcggtacccgagaaatgagtttttgtttctacaattatcatctctaggcagtataactatgggaggttggttgttttcagacagggtatcacgctgttgccaaggctggaatgcagcggcacgagatccgagctcactgaagcctcgacttcccctggctcaggccatcctcccactccagcctcccgagtagctgggactacaggcacatgccaccatgcctggctaatcttttgtattttttgcagagacgaggtttcaccatgtttcgtaggctggtttccaactcctgggctcaagtgatctgcctgtctcagcctcccaaagtgctaggattacaggcgtgagccactgtgcctggctgagatttcttttttttttttttgagacgtagtcttgttctgtcgcccaggctggagtgcagtgatgcaatttcggctcactgcaacctccgcctattgggttcaagcaattctcctgtctcagactcccgagtagctgggactacaggcatgcgccaccacacccagctaatttttgtatttttagtggagatggggtttccccatattggccaggctggtcttgaactcctgaccttgtgatccgcccgcctcggcctcccaaagtgctgggattacaggcatgagctactgaagccggcctgagattttttttttcttaagcaactgcttttcctcatttctcttagtaacccagcactaataacttttaaaccccagcaaactaaaagtgttatgcaaatgagcacccgccctagaagggccatggccggccagtgctcgcccaggcaaaagccccgcagcagtcacagagggcgggaagctgcacggccctggacactcagtccctatgggaagtagggcccgctccttccagggactcaaagcctcagagaggccagagaaaggtactgggatggtctgctgggaggcggaaggctagcagaccctgcgggagacgctgactggccttcggggaacctgacagggttagggctgcccctgcctcccttgctttcctcctctccatgagaaaacccgtcagcaggtggacagcgggcctcagactgccggtcagcagaggctgcaggcaccttgaatatggccctttctcggagcagccgctcaggcaggttcttgcgaggcagctccctcgtcgtctgcagctcctcattccagtctcgggtctgcagagagatcagggagggaaaaacgagctcagcctgtgccctgtgacctgctcccggaagtcgctccttctaccttcctgagaagagccccagactcccaaatgaagtcaagcatggggcctccagggaagtgcacggaaccagcccagcacccaggagggcaggggtgcccagcgagggcagggccaggttgcaggcacctgtccaggaatgtgctcctcatagcccagcctcgaggtgtaggcgtcctctgcacgcacgcaatccatggcatgctccgcctggggggctgtccagctgtacacctggaatggggtggcgatcctctcgaacgggtggcgctggaccctgtggcaggcaggggagggggagatggggcagcccaccaagctcagagcccttccacgggccccttttctgaggcccccgcctgctccggcatctcccaccctgagacactgccctggagccagatggaagtgcacgggcgcctctcctgcggctgctgtctcggcactggccgacagctccctagagcggggactccaacactgggggcccagggcggtttcttcagacagaagcactggagtgcaggtgggccggctcaccccatgcccccgtgtgccatgagacaaggcgggaggggacaaaggcactaccttttcttctgcagcacagcgaagttcttcttgaaggtcgggctgatctggttgagcagctccactagggaatggcttaggaagcgggggctggcgggcttggggttgaagtgataagctgtggacctgcagggagagggcgggcactgagcgggggcccaggtgtctgcccagacccaggacggctggcacggcaggggggtgtggtgggctggcagggactcactgattcaggtaaaagccccgtgtggacgcggtgatgctgacttgccggtcctcggctgtgatcacaaacaggtacatgaggtccccgtgcatcttccggttccccgggggcgggttccatccgctcatggtgagtactttcaggcactgcaagggcttcgggagcggccgagtctgaggggccaggcctctggtgtggggcctccaccccgccagggaccctcttcctccctcccccaggatcctaccttccagtcacggttttggggctgcaggggacacagtggccgctcccggctccctggcaggatgtactcgggtggtgtgcagtcgatggggtccatctccaagcccttcttccgcttcccgctgtctgagggacccgaggctggtggtcagcacagggccacccagggccagctgtctccctacctcctgatggccgtggtccgggtgcctcaggcccaggcccctcggccccttctccagccccccacctccgtgctccccgccctttggcccaatccccggccccagtgcctcccgcacctcccaggtcgccgtcggtgaagacactcaggaaggacaaggagttgcagtcaaccccgttgaaggcatcggatgggtccaggctcttgagcaggtctcggacatggcgcacgtggatgcgggcctcacgcaccgtgtacggctctgtcaggaaggcagggagggtatggcgttaccagggccctgcaccctgaacaacctgcccagcacaaaacaggttttggaggtgctaacacagtggttttaattttcaactttaggtttccgttttcaaattccactgtgaacacataagctggagttctggttttgacaccacaaacacacacacacacacactctgcctactggtgagcagggatctttgtttataaagaactttctgccaaatgcctctgaagcacacacaggcctcaggcgtccacaaggctgcctgcttttgtgcgccagtgtgtcggctgggcagggcttttggagctgtgggacttccacaccacagccttgccctgctctcccgaggcagcctcatgtaggggtggcctgaggactttccaaggcccccaatgtcaacactgcccctatgtggtttcatgggattttaatggcagttcttttggtggaggggagaggttccgtgatcaactgtgggcgctgttgagctacagaccttttccgtcactgctctcaacaggcggacaggccctggggtggaacccaagcagcttctacccagaaaactcgaggccacagaccaaccggatggcacctccccgtgcccgacctccccactctagggctaggaaacgtttgggacttctcatggatctctacagaactgaactgcgctgacttcacgccctgggatggtactgcctgattttttttttttagaatcacggctctgttcttttgttttgtttttttttttgagacggagtttcgttcttgttgcccatgctggagtgcagtggcacgatccgggcacactgcaacctctgcctcccaggttcaagtgattctcctgcctcagcctcccgagtagctgggattacaggcacctgccaccacgcgcagctaactttttgtatttttagtagagatggggtttcaccatgttggccaggcaagtctccaactcctgacctcaggtgatccacacgccttggcctcccaaagtgttgggattacaggcgtgagccaccatgcccagcccacggctctgttctttaacccatgggccgtgaagttggcagatataggtgtgctggcctgagaagcagatctgtgctccaatcctgcctccatgagctcatccgtgacacagggaccctggcatggatggtgctgcctgcctctgcctccgtgggccctcccccgggcaggctgtccaacttccagaccaaccttccaccacacgcagcacagagccctcctgcagcccctcgacgctgcgcagctccgagaagtggtccagcacgttgccatccaggtgcagtgagaagcaggtgcggtgacacgtgtcctcccggtccatgagcacctggtgaatctcctgcaccatctcctggggggacacctgcagggagaaggccccgcccaccccggtgagagagcacgtagcggggagagaaggccccaaccgccccggtgagaggccacgtagcggacagcaaggacaatatccccttgtccccagcccaaagtaccttggtccccagaataaatgccccaaatactcgaatatcggctatcccactttctggcttttaaatccaggccatgtccacacatgccatgccctgtgtgtgcagcctggagcctggcccaccgactcggcctgcagacccagagcaatgcccgagcagagaagggagatgaagaacagcgggacagaagacggcaggctcgcccccggccttgcccagtgctaaggtgcctggggcaaatggctttccccttccagaaggggtgctctggggcccaagcctgcgggtgccgagacatacgacgaccctgtctcgttccccactgagtcaccggcttgcaagacctccacgctggctctgcccttggagataacccaatactaccctcccctctggcagatggtaaaatcacggcccagagagaggtgacttgcctgagggcacagagcaagaggctggggagtcctgggatgccaacacttcccagccactatcactcccctccccacatagggctggcaggcccagctggttgctgtcctctagcaatggggcaacgacctgaccctgggctcgattcccacgtccaccacgctagctgagtgactctagggagggcacgggatcctcagtttcctgccacaaaatggggccggtaggagcacgagcaaggctgagctttccagctcaccctccccagcaggctcaggcctggcccccagcacccgttcctccatcttacctgcagggagaagggctcgatcccaggggcgaggatcttcacagaaaagcccgtgtcctgaatgacaatgacttcctggccggtggtctcatctcccgggccggcctcgtcaagcccattttccctgggtggctcggccgccgccgcctccttcttcaggctctctgggcagtccccgtttaagagcatgactgatggcagctctgcgggtgacaagaacgggtcagaatcaggcagcctcgctggtcggcggggctgtccgcctgaccccacacggggacacgtgccttctggaaaggcatctgcatgccctcgagagtcccagcctcacggtcgcgcctcgccctccgtgcacctgcaggccacttccacacccagccgcccctcccagccactgttccctggcccactgtggtatggcttgcacctgaacccatgtcccaaaccactctccccagggtcaccaaagccacccttcaagccaagcccgagggtctcctccggccctaacacacctagcttcccagcagcagttcccctcttcctctcctcttctctgaccccacacagtgcccttgcccctccctctccagctccatcctcttccatccctcctgagctgtggtcctgggctgcaggggggctgcaggggagtgcctaggcccagcctctcctgtttctgaccccaccccctcccatacactcctgccccgtggctcacacggccaatcctgtcctctctccagccttttggaccaaggagaccgctgcctcccaggcatcaacatgtggctgtccctgaggcatcactgaagcctcgtcttgcagggacagaactcatcttcctcctcaaactggcacctgctctatctagtcacccaccctaaatctcccaacccacccacgggacccggcctctgcagccactgccctagggcaggcatttcctctatttcagcagtgccacctgcaaccctcctaggaagcccactgcttacaagaccaagcttctcaggccagcgctctcaggcacccacctgaagtcagcctcagctcctgcctgctccctgctgaggtctaaggacaccacaccatgcaagcctggtaccgcccacagccctcccaccgccctcccaccgctgtgcttctgtgtctgtgctgcccctgacatcccattctgtacagcaaacactgactcacccttcaaggcctaggagaaataaaccttttccacagcctgcccaaatgacccttaatggcagaatcacactccctccccctttcattcccagagacattcggctgcacccagggtggcgtcctcaccagcagctctacccaccaccttctatcttgcccaggctcaacaaaaaaggcaacaaataaagtacttactgcaaacctctagctacatccaatatttgaagacagcacccaatccacatgctccagggtggggagcaggtgacaaaaccttgcattcctacccaggcaccagtggaacaaaggagaaccccctgttccgctgaggagccaaggatcgcctctcagtaaccctccagcagacacgggcctgcctgggcacccatctaggagatgaggaccttggcccccaggatctgtccatgggccaggctcacctgcctggcttggcttgaagttcaacggtcccaactctgaggagtgcctgggttcccttccagaaagaagagctcgcccagctctgcccatcccatctagaccccacctccccttccccacccggctctcaggagcggggacaggtgcctttcccagaactgtgtggtcccaatccggacccaccagaaacacggagcaggagcctcagggaagggatgaggccagtacggaaaggcagagaccggggggcctggagagagtcgctccctttccctggatccccacgagcaaacgagaaacaggacctctaagagctcagagtctcttcccccttaccccaaagaggggtatttgaagcccagaaaggctcggagcctggcctaaggtcaaccaagtcagaatgggccccagactccctcctgcagcccgcaccctacgccgcggcactccctcaactctggccactgaggaccttcagtaactgtgcatgtcatggctctccaccccaccctctccaagcctgcagtggactcccaggaaccacgaggatgtacaaagacctcccttccaggatccaaccgccccaggaagggcacccccaatcccctcgcacgtgagcagccccacacacctgcctgactctagtgacagagcagaaagacagccggggcggtggtcggtcagcttgcaaacagcaagaggcagggcagccaggtggaggaactgcccccacagggtccctgagaaaggctgtgctggctgccaagcccctggaataaggggagaagcaggaagggcccccacccaatatagaacagcagttttgagctatgagatcccaaaagtggggagtcaaatacctagacagagacagcctgtgttctttcgcatgtctggaatgggaggacagaaaggagggacgacaaggcaaggtggccgcggctcccactctccttccccagcccagggagacgaccctcagggggtacctattccctatcccgtttcaaaggaatgcagctggctcccaaggggcctcctctccccaggacagcatgttttaccctaatccttcctcctaggaaccccgaaggtctccccacccctggatgaaggctgagcgatctcccccgcaggcagctggctggctcaccaggtcccggtgctcacctggtgcagttggcagctgccctcccctcggctctggagtctcaggatggccgtggcagcaaggcagccagctctccagctcagccccagcattgcccgggttccttgttccagcctctgccgctacccttgccctaatgcagccagtcggcccggggctggagctccggctggcttcgggtttcagtggggccaggcctgccatggcagccccaggaagggcacactccccctgcctggcatcccgctcaaggtcggccagaaggacggctgtgggccaggagaacccggtggccccaggaccccagggggagctgctatcagcactcaggcccacctccctatgccccctagagagggggtcactgccggcaaagccgctagggggatcggagaacccagaatttggggtacctggacccctcaagattgagggcctaggagactggctggcaggggcagggcccagcaagggggtcctctcctccgctcccatcccagtgggggtgaacaggaccgcttctgccagctgccgccaacagctggcacagacccgggtccaggccataaggtggctgcctctgcccaccagtcccagacactgagcaccccactgtccctgggccaagggcctggctgggacctctggctcctgctgccccctgcaggtgacctggctgccagccccttcctgggagtcactggttctggtggaagggagggggatgggcccccagcttcccagaggacaactgcacccgtgcccctggcctccaggctccatcaagaagctggcaggctccatcttcccttcccagcagccccggctctgccaggagggaaccaagtctctcccaggggagaacagagctggcagcaagaggccagtggccgcacggcgggggaggaggtgcccagctggccagggcgccttcccagggcctctgacatgctgccagtgcccagtaagggctgccccagcatccaccctacccagggtgggcgggagccaggctctcactccatcccctcccctccaggaccagggatcaggcagaccctgggctgcttcacagcccccatggaaggttctgggtctcacacaatgaccagaggagaaggaccaggcctagacagagcccctctgctcctaccctctcctgaaatacaccctaaccctccggagagaggggtggggcagggcagcctggcagtgaccccagagaagtgttgacaaccacctgcactctgattaccacagagccaggactcacgctaggcccagcccacggcagctccctaaaccgccgtgccagcccatctcacctgaggaaactgaggctccagaaggctaggaagcagctgcccaaggtcacagaggcaagaggagccaacccagagcaagaaaaaaccaggtgttactatcacatttgggattaagtttaaaaaaaaaaggaaagaaaaaacaggagtgtcagacgcccaagcccatggcttttgagtcactcccactgagcgcgggctacccacccgctcccaccgacctgctcccgccgacccgctcccatggacccgctcccactgacccactcccactcagcgcagcccacccaccccctcccgaggggcccggcagcacccacaggtaggctgcacctgcctcctcgtccaggcctcagcctctactcgggggggggggagcagaactatcccagtcacagcactccccaaggcctctacacccttgggccaatactccctcctctcatagtccaggagcacctctgaggatgtgagctttaggggaggggaaaaggaggtcttctgcagagcgggagagccgtgccccaacagcactctgcatacacgcaaactcagatgctagtgaagagacaaagcacacccttgccccggcctggaggcgccgggagctcaaaggcggcagagaggaggaactagaaaagaaacttaggcctcccagaggacctgtgtgctgcccaagccaggcacaatctcactcagaagactgtgccagggccaggccacgccccagccaaggcctcagcaagtgaggctccagcaggaagtagggtccgaaaaggtgcatcacccgtcccgggagcccagggcttcagggaaaggcaatggggcgggcaggcggcctatggaagaacctacagaccaggcacctgtttgcctccttcctgtcccacccaggccagaggcaggcgttcagggcctgaggacagttcagagttcctcaggctgctctccccacatcccatccaagatcctgttgcggagctcccataagcccctagactccttccccagctgccagcctcctcctcctccccctctgggcctcaactccagggagccctcccctgggcagaaggaacctgacgcaccactgtggacctgaaaaacctgcctgttctcttaacccctaaaagccgctgtattcccaggaaggtaaccaacccttgcccccgaccctcaatggcctagatcagctccttcctaagggggctgaagagccttccagagctggatctcagaggtcagaagccttggttctgatgctcaggtgggccccagctggggggtcttcattaaggctccttccttctttcaatagatccgggctggctgtaacgtaagtcctagctagctgtactaccttcccagggacgtaggagcccatgtcctgcccacgagtatgctcccagtttccccaaaacaaatagctgtgcccttccctgactcagtttacccccgacagagcccccccacccccagcagagttaggaaggggcttcactgactccctcacagaaatcctccaacagacgctcgtcagccccctagttctcagcacgggatccaaaccaacacgcctgtcccagcttcctctgggccaggccacggcagccttggcttgctggccatgagctggaatccaaacacttcccttaacagctaaatcgctgtgtgaccttgggcaagtcacttcgactcttcgggtctctgctagaggggaaatcagccaacctcctctcatccagcctgcccccactgattcagagccacatcagcacaaagcctggtaggttggggcgatgagcatctgctcttctgcccaaaccttggccttgtctagacaatcagcagtactgccccagcacctgtccctcaccccaaggcaactccgctatgatgggaacagggtcagagggctgaacgctgtccccatcctgattcccaagtcagccctggcgcactcactgaagctaggaagggagatgatgaggcgttaagaccacaagtcccaactgaggacagtcgacggaggagggagggactgggggacaggagtagctctgcacctccactgccacccagagcaaagagggcctgaggaagatgacgactgagggcctgggaaggggattccagccccaaggctggagtctgagacacggtggagggaacagaaggaagagaaggggctcaggagaaagggaaagcaggccccacccgagacaagctgcagccactgccacagtcaccaccatacagcccccatgggggatcgctgggagcttgactccacactaacgacctttgccttaaaaacagcaactctggtctgacccacttttcgcaataaggcaggttaatgatcaagttctggcacaaacacttccccctgccaaggagtttggctctgccccatgcaaaggcagacgccccctacaccaggtcggccgagcaggccaacacacctgagagtctccgccacagcctgaagacctgcggttatagcctggcctcagggcatgaaccagggacgcccctcacaacgcacaccccgcacctcgtgctcttcccacaaaccaagcctgggaagcctcgagcggagcttcactcccagggctgcagccctgcgcacaggggatgcctgggaggccgccgcggagcaggtgccgaagggggctgtcccgcaaacgtcggagcgaccccagctcagagagctcccatgctcgggcgcagagggggtggggccgccgattctttcggtctgcggcggcggcgcaccccgaaaccgcgtgtgcgcgcacgtgtccccgcgatgaggcgcgcgtgtgcccgccgagggtgccagccgaggctgccctccacgggaccgcacgtgcgaaacccgggccgcagccgggggcgactgtgaaggtgaccttcagcgcgggggcgacccggtgaaggccccagcgagatacaaccgggcccgacgcggagggaaggcggcgatccccgcggagtcccgaacccgcccgccctggtccggcgccccccgcccagcggcccgctggccctggccccgctcaccggccgcgcccggccgccccttgcccccggcctgcgagccgtgttcccgggcgctgtcggccggggcggccgccggcaactcgtccgtcttgataaccatggtggcgggagcgggcgtccgcctcggctgtccgcgccgcccgccgcgccactaacccaagtgccctgcgcgccgcggctgctgagggaaggacggagtcaccggcccacgtggtgcgcgccgtggcctttgaccccgccgccgtttccctgccccaccctcgcgcccggcccagcccacggcggcccgcgagggacaaaacgcgccgcgcctggttccccgcccacggacgcggtgactttccagaacgtcttaaaggcaacgcactctgactcaaggcccagggaggctgggcgccctcgcggggcggggcctcggggagactccctgctgctcgctgcccgtcgggcgggcactgtgaccttgggtggagactggtctggttctgccatggctaatcctcccctctccaaggatcccctgttttctcttgcagatttgctaaatgaccgcgcagtctgtcatctgcggtgttcgcgtgaccctcagcgccctccccacccggcaggccctttcccgccgaatgggtgcggctggattattgagggagtggagggtcgcttagggcacgggcacgagaggcgagggcgagacgtggctaatggggatcaagagtcagaatggacccgccaaactttgccccgagccagaacgggctccctacccgcgtcctcgacccatgggtcctcacctccaggctggtgtcctcattttacagtggaggaggccgagaccaaggtcacacagagagcaaggggtagagccgggtctgactccatccacagccaggacgctttaactcgtatttttcacttggcaggggcttggcggggacggaacggtgaggtcagagaatgctgcagaggggacattgggaccaggtcttgcagtgagttgaagtgctccaggcagagagcgccggtgggtctttcctggccaggccgcagggggcctttgggaagcacccgaggcctataaccttcggagcgtttgtcaagctctaatgagaactggaaagcttcagcttcccgaggtgggctgggagggccttaggtagggcctcgcacaaattgcgaaggaaagccgaccttgttctggagagcacgtggtgaggaaagccagcgacttgatgtgagcatttaaacgggaggaaggaagatgagaactggtaagattcttctcggccgggcggtgcagcggctcacgcctgtaatcctagcactttgggaggccgaagccaggcggatgacttgagttcaggattcggaagtttgagaccaacctgggcaacatttcaaaacccccgtctctacaaaaaatattgtttaaaaaaagccaggtgtagtggcacgcgcctgtagtcccagctacttgggagctgagctgggagtatcactcaggacggctcagattgagcccaggagttccaagctgcagtgagctatgatcgcaccactgcactcctgcctgggtgacacagacaccgtctcaaaaaaaaaaaaaaaaaaaaagccgggcgcggtggctcacgcctgtaattccagcactttgggaggcagaggcgggcggatcacgaggtcaggaattagagaccagcctggccaagatggtgaaaccccgtctctactaaaaatacaaaaattagctgcgcatggtggtgtgcgcctgtagtcccagctactcgggtggctgaggcagaagaatcgcttgaacccaggaggtggaggttgcggtgagccgagatcgcgccattgcactccagcttgggcaacaagagagaaactccgtctcaaaaaaagaaaaaaaaagtgtgcatatatatatatagtgtgtgtatatatatatagtgtgtatatatagtgtgtatatatatagtgtgtgtatatatatagtgtgtatatatataagtgtatatataaaatatatatatttataatcaatatatataaaagtgtgtatatatgtgtgtatatatacacatacatacttatgtgtgcgtgtgtatatacgtatgtgtatacacacactcgttcctcttttgttacacaaatgtgcagaaaattgtacctgctattcttcactctgattttttttttacacgctttcagtaggtgttctcattccatttacgctggataatgttgtattgtttggttgtaccataattcttttagccggtcacctgactgatgggtacttagtttgtattcatgaaactccagggtttttgagaattgtgcctagtggcccagtgcagctgaagttggaagcccgtgcatgttgctaatgctactcataataggaagctcagttttaaccctgggggttggggaagagcagcaagcctggggttagagaaacagacacgtataaaaagcatcatccagccgagtgcggcggctcacgcctgtaatgccaacactttgagaggccgaggagagcagattgtatgagctcaggagttggacaccagcctgggcaatatggcaaaacctcatctctacaaaaaatacaaaaattagctgggtgtggtggtgtgcgcctatagtccctgctactcaggaggctgaggtaggaggatcacttgagcccaagaggttgaggctgcaggatctcgccactgcactccagcctgggcgacagagcaagaccctgtctcaaaaaaaaaaagaaagcaaagaaagaaaagaaaagaaaaaaaaatcatcctctgatcacattctccatagtctggtggtctgacctctgaccacacattaagcagactgattcttgctttcacacagcttccaccaaagtcttttcatcatagtctttttttgggacagcatctcgctgtgtagctcacgttggagaacagtggcaagatctcagctcattgcaaccccgcctcccgggttcaagcgattctcctgcctcagcctcccttgtagctgggactacaggcgcccgccaccatgcccgactaatttttgtatttttagtagagagggggtttcaccatgttggccaggctggtcttgaactcctgacctcaggtgacctgcccaccttggcctcccatagtgctgggattacaggcgtgagccaccgcacccggcctccatcatagtcttaacagcacatactcccattttccccagctatttccaccattgcctataacaatgtgctatggttaaggtgatcgcatagtttatcattaaaaccagaacacttttgagagtgcaagtggaacctattaataatgacacaggggcaataggcataaattgagaccctcttggccatactgggatgtctgggtcttgggtgaggagtccagctgctagacccggggactttgttattttttatttttttttgatatggagtcttgctctgtcgcccaggctggagtgcagtgacgtgatctcagctcattgcaacctctacctcccggattcaagtgattccctgcctcagcctcccaagtagttgggattacaggcatgcgtcaccatgcccggctcatttttgtatttttagtagagatggggtttcaccatgttggtcaggctggcctcgaacttctgacctcgtgatccgcccgccttggcctcccaaagtgctgggattacaggcatgagccaccgcgcctggccgacctggggacttcttgaaggcaagaaccataacttatttatctgggtgttcccagcatctttccagagcccaatgcatggtaggtgtttaatgcacatttatttatttttaattttatttttagagacagggtctcattctgttgcccaggctggagtgcagtggcatgatcacggctcacggaagcctccaacttatgggctcaagtgaccctcccgtctcagttccctgagtagctgggattacaggtgcacacgaccataccccacttaatgcacatttgttgactgagtgaatgatttcagtgtagaaggtgccaggccctgagggctccacaggatgtgggggggcagcattgctggcagcctggggtttcacctttgagccccccattatttatttatttatttattttttgagacggagttttgctcttgttgcccaggttggagtgcaatggctcaatcttggctgaccacaacctctgcctcccaggttcaagcaattctcctgcctcagcctccccagtagctgggattacaggcatgcgccaccaggcctggcaaattttgtatttttagtagagatgggttttagtagggttttagtagagtttagtagggttttagtagagatgggtttagtagaggtggtttctctatgtcggtcaggctggtctcgaacacccgacctcaggtggtctgccgccttggcctcccaaagtgctgggattacaggcgtgagccactgtgcctggctgagtcccccattatttataacagttggctttcctttcagacactccttttgtgtactgtatgctttgacctttgtgtctagaacttcagatcatttccataatgcctgactgagacccaccagcctgagcccacggaggatgccaagcggaggcacctctccctatcctcctcagggtcagtgagcgtccgtaagtgcctaccggtcagcatggggatcggtgaccagtttgtccatgggcctagtgacgaaccagtcccagcagctttagaatctgcagtttaaggccgggcgcagtggctcacgcctgtaataccagcactttgggggccaaggcaggtggatcacctgaggtcaggagttcaagaccagcctggacaacatggcaaaaccctgtctctactaaaactacaaaaattaacctggtgaggtggcgggtgcctgtaatcccagctacttgggagctgagggaggagaatcacttgaacccaggaggcggaggttgcagtgagccaagatcatgccactgcactctagcctaggtgacagagcaagactccgcctcaaaaaacaaaaacaaacaaataaaataatctgcagtttatctttggtggatcccttcccctttccctcgcagggtcctgttgcacagcaggcgtccttagggctacctcatggcactcctgagcactgcagttttcctatcttttgggtccctgcataaagataaggaggagggttatctagtctgagacccagcctgcataattagcccgctcaaagcctcccacctccctaattactgttatcatggatacacccactcagcaggccattcctacattcctatttccccctcctttgcacagttccctagggggctggagaggtgatgtgggaacccaaatcccttcgactgcggcacagagtcccctacttccctggccaatctctgggaacccctagaaaggaagttctccacctccctcaaccccaaaactgcatgggcagaactgccaggaaggaaggggtaaccgccagcaagatgccctgagcttcagtttccccatgtgtaaaatgaaggggttgcacagatgatctttaagagttatctgaggctgggcgcagtggctctcgcctgtaatcccagcacttggggagacccaggtgggcagatcacttgaggtcagaggttcgagaccagcctggccaacatggtgaaatcctggctctactaaaatacaaaaaaaaaaaaaaaaaaaaaatctgctgggcatgggtggtgtacacctacaatcccagctactcgggaggctgaggtgggaggatcactggagcccggaaggaggaggttgcagtgagccgagattgcgctgctgcactccagcctgggtgacagtgagactccctctcaaaaaaaaacagccgggcggtggctcacgcctgtaatcccagcactgtgggaggctgaggcgggcggatcatgaagtcaggagatcgagactatcctggctaacacggtgaaaccccttctctactaaaaatacaaaaaattagccgggtgtggtggcaggtgcctgtagtcccagctacttgggaggctgaggcagaagaatggcgtgaacccaggaggcagagcttgcagtgagccgagatggtgccactgcactccagcttgggtgacagagcgagactccatctcaaacaaacaaacaaaacagttatctggttttgacattccatatctccaccctgaactgtgactctgggatgggcttagtcaagcatccccaggggtctgtctgtctggggaactctaatgcctgtgccctgccctccccacacttctctttctttttcttttcttttttgggacagagtctcactctcttgcccaggctggagtgcagtggcatgaccccggctcactgcagcctctgcctcccagattcaagcgattgtcctgcctcagcctccagagtagctggaattacagggttgtgccaccatgccgagctaatttttgtagttttagtagagatggggttttaccatgttggccaggctagtctcaaactcctggcctcaagtgatccgcctgccttggccccccagagtgctgggattacaggcatgagccactgcgccccgctccctttcttttctcgttttctgaaattgtacatgagactcaagagtcttgggcagatgtttatccaaggctgggccttcggttccctaattgccccaggagataaaaggctaagaacaagaagaggcctgggccaggctgcctgggcttgctgcaggtcctggtcccagcccatcctgggcccaaacctgagtctagaggcttaagcaagaaactgagttcaaaataaaaagtaggaaaaaactggccaggtgtgttattttccacgtggccactgcatttcagcctgggcaatagaacaagactgtgtcaatatatatatattttgagtatacatatacatgtgtgtgtgtgttgttagctaggcctgtactcttcagctgctcagaaggctgaggtggaaggatccccttgagcaccagagttcaagtccagcctgagcaacacagtgagaccttgtctctaaaaaaaacaaacagccgggagtggtgactcatgtcccagcacttttggaaaccaagggggcgggtcacctgaagtcgggagttcaagaccagtctgatcaacatagtgaaaccccatctctactaaaaatacaaaattagccgggcgtggtggtgcatgcctgtaatcccagctactcaggaggctgaggcaggagaatcccttgaacccggcaggcagaggttgcagtgagttgagatcgtgccattgcactctagcctgggcaacaagagtgaaactccatttcaaaaacaaaaccaacagaaacaaaaaaaaattccacacctaagtttgggagggggaggggatttattgatccatgtaacagaaaagggtaggagtctgtgagcttcgggcatggctggatccaagtgacttgattatctggaattgtctccatatctctttgttctgtttctctctcttttttttttttttttggaacggagtctcgccctgtcgcccaggctggagtgcaatggcatgatctcggctcactgcaacctctgcctcccaggttcaaaggattctcctgcctcagcctcccgagtagctgggattacaggtgcccaccacaatgcccggcttttttttgtgtgctttttgtaaagatggggttttaccacgttgggtaggctggtctcgaactccggacttcgtgatccgcccgcctcggcctcccaaagtgctgggattacagacgtgagccaccgcgcccagccattctgtttctcttgtggtagctttatactcaggcagctttaccccttgtagtggcaaatgacctgccagatttcttgggtgccattttagccacccaagagtttgtccttctccatagtcatgctttgttcactgctgaaccaaacggcacctaacatgaggtgctgaatgaatgtctccagcaaaaggcccaagattgactcttgttggctcagatggagttgcatgtcttcttccgcccgatcactgtgacctgccacgcctgggccacatgggtggagtccgccctccccacacatggactgagatgggtgcagagcagttccccagaaggaagagatgggtccttccacctgggtccttcctttaggaggaaggaagagatgcgtccttccttcaggagggttgcaagcaaagccactttttttggttttggttttggtcccccgtgtccttagaacacagagctgctgcctttttctctgagtcatccccaacatagacctgcattgaaaatgtaccagcttgagttctcatggtgctggctgcgctgagctcctaaagctgcagtcccaggataaccctctttagtggaggataagaatagggctcctgccgggatgcggggcttcttgcagctggatcaggtggggggcagggcaccagcatggccaaagatgccagaacccaggattccttctgggaaaggacagtgggcaattccaggcactggacccttccaatcttctcctctccactctagtcaggagcctgtgatctaagattctgtttcttcatttggattggggtggcatggagagaggggcagggcttggctgagggtgaggacacctcagatgggtgccttatacttgatctgaggaacagctttttttttttttttttgagatagtctcactctgtcacccaggctggaatacactggtgcgatctcagctcactggatcctctgcctcctgggttcaagggattctcctgcctcagcctcctgagtagctgggattacaggcacgcgccaccacgcctggctaatttttgtatttttagatagagatggggtttcactatgttggctaggctggccttgaactcctgacctcaagtgacctgcccacctcggcctcccaaagtgctggaatggcaggcgtgagccaccacgcccggcccatctgaggggttatctactgaggggaccccagagtctcagctcctggtctcatcgtaccccctggctgaccctgaaccacctcctggctcatccacatgctcttcccacacctgcaagaaccgaggtgtggtggggccgagtgcccaatgcaagagattggactcacgtgtttttcagagattttattaagaataaggcatatgacagtcacccctaaagcacagggctctatttctgtgggtgagtgaatacactctgaaaagcattggatacaaaagcgcagccaacagagaatttggagcagggtccctctgccctgccacagggctcctgccaggtgggtttgaagccctgcacatcccccattcaaggctggcatgtccaggagaaggtgcttggagacccccggctccccgcgcttcgaagctgccccacaccctctaggcctccttcctctctccaccaggggggacgccatcctactgcttatatggggaagggttatcccattttggccctggactagtcccccaagctagagggtgctgtggctgagctgtgggggccaggggtacagagcctcaaaccgcactgcccagtgctccctggctgatttccagagcagggggaggtccccacctgcagctctgtgtcctggagctgtccatacttggggtgtggcaggagctccgcctagggacctgagtgtcctcttcaacactctctctcccaatggggattcgtgcagcagaggagagagaaatgcagtcctttcccttcttagtcaccaagatattccaggggccaggagcgcgtgggggtgcgaggtttccctttggccaggtgggctctcaagccagacccagggagggtggggcctctccagggccctgaggctgaggagagttgggcccctgtggccaagagcgggccatgcactccagctcccagtctcgttctgctgcacagagggttctgtgcaggcgggtggaggggtttccattatttccaggagggcgaggaggggaatttctgtgaaaactggaaccctgtatctgctacaggtgctcccccagcttgccttatttcctttcccaggcacctccagcacctcagctgagagtcagtgagtcagctgccccagcacccagaacctttcatctaggggatctccaagcacctcacaaacaattgtcattatctgtggttgctggaagagggatgggagttgggtggagctgatggggtcacttcgggagaagcaggcaggccactggaagatccctgggaccagagtgcggtgggggcccctagctggacaccctggatgcccaggagggaagggggaagggggctattgctatagagctggggggaggccaggcggacggagctatggcttttagtgggtgggtgggcagatagagtacttcaccatctctgcagaagaatcgacctaacaaagtcaccctgttcaccccaaaagtgtggtcgtgggagatgagggtctgtgcacgctcctctggaaagagactttgcccttcttcccacagtcctctgggcacctccgagagaggagtgaggccctcacacacaagacaggttctgaaagggagggggacagaataggggtgcagtgagttacacacacttgaggggggacagagatggtacaggcgcaaccacaggactagtagagagtagaggtgggggcaggcagagcaaggaccccaggccaccttcttggcccaagttggactggagagcactgtcccaagggtgccccaacctcagccatctgcatcccaggagctggacaccccagaccaggcgtggttattgctcagtggtcttgggcagtcccgagtggcgtcagctgggagagccgcacattgcttggccctgagtgcgctcgctcactggtttctacttcttgccaatttcctgctccaacaaatggagagaaagggggtgtgatctgggactcccccttcttcatggggctgtgatgggagaagagctcgtcacccctagagcttgactctgctcacctcccagacccctgcgtgacagaatgtgtggcctcagccagggtcaggacctgtcaggaaaggggtgtctgtgagggaggcaaaggcctctccctgccccacgtcctcccctcgaagcccctggaagacctcacaggcacttaggacttgatgcaggacccacacaggagggatggcacgggctggaggggtttgtgtttccttctaggctgggctgggggtgggggaataagctgcgctgaaactgtccttcctgcctttggtggtggacggggagcttgggagaaggggcgttaggaggtggggctttcccctttccacgtcgccattccccaggctagacagcagggaactgagcagcccgccactgccagattctgataggtttaggggcatccgtggagggggccaggatggggactaacctgtgctcccaccatccccccagcaaacacaaacccaaactcctatcagtagctgccacttccaagaagccaggcccttcttctttttttcgtttttgagacggagttttgctcttgttgcccaggctggagtgcagtggcgcgatcttggctcactgcaacctctgcctcccaggttcaagcgattctcctgcctcagcctccggagtagctgggattacaggcgtgcaccaccacgcccggctaatttttgtattttttagtagagacggggtttcaccacgttggccaggctggtctcgaactcctgacctcaggtgatccgcccacctcggcctcccaaagtgctgggattacaggagtgagccaccgcgcccagccaaggctctcttcttcttgtctctgggtgcagccagctgattaggaagccgagcaacattagcaccaataaacaggaccaggaaaacgcctggggctgcctcctgagaaggaagacagctcctgccttccagaagcctggccagcagcaggcctgtcacctcccttccccagcagagctcccagtccctgcatacccagcggggtggcgactcgggaagagctgagctggagacggctctagaccaagtccggccaaccaggcggttctgtaatcctctcccagggcccatggaagttaggcttccatcaggcgcacttttcccaccaggggctctgggaggacgtgtcttctaaagtgttccgtgctcacctgcaaggacctatcggcagggtcagggtgggggtagaaggaccagcccctagcctgggcctctcctggggaggaagaaggcttggcgggaagggcgtcggcgcgggggtgggggaggcggggggtggggagctagagggcctggggcgccaatgccactctgcgtccctttccgtaggcgagcccagccctccccaccccaccaaggattgtcggctttcccggggaagggcgtggcccccgcccctcctgtctcacaggcaggtgggaccaggccaggatcgggacggcgagtcctctcggtagagaaggtgcccccgctcggccccgcggaggaactctcgcgcgaggagagggctcgaagctttggaaacgtcgggaagtacaaaaggctggcggttcggggatttggggggagccggggccgcctcgccccgcttcctggaggaggggcggctgccctccgacccgggacctgcctgcggggaccgagctgcgtccctggccggccctccccgtccgtcccgcgtcaccccggccagcctggcgcctactccgggtccccgggcgcgctgggctggctgggcgcgggctgcgggccggctcggtccgggggctcctggggaggcggctggcgcgggctgcgggcgctgggccgcagcggcctgcgtgcatagaggaagagcgcggggtcgggcatggggtcggcgtcgtcgagggcgccggccccgcggtcccaggcggcccagtcccggccggggcccttggcggcggcctcgtgggcagcaggcgggcggcgggctcgcagtgcgcggcggcgtggcctgggctcggcggtggcgccggggcccgggcgcggggcctgcagtctctggcgcgccgcgtgcagctggcaggagaggtaggcggccgcctcggtgtgcttctgcagctcggtgcccagcacggtggcgcggtggctgcggcggcgcagctcctccaggaagcggcgctcctcggtgcgcaggctgcagcgcagcgcggacaccagcgcctcgcgctgcgccacctcccgccgcagctccgcgttggccgcagcacgcgcctccagctgcgactccagcgcgcggcacttgctctccagctcccgggacgccgcctctggaacggggcagaggccagaggtgacggtctccccctggcttggaacagaacctgcacggctcagagctccgtgtaacaaaacccccaggccgggcgcggggcctcatttctgcaatcccagcactttgggaggccgagatgggcagatggacttgaggtcaggagttcgagaccagcctggccaacatggtgaaacccagtctctactaaaaatacaaaaattagccgggcgtggtggtggtggtggtgggcgcctgtaatcccagctactcgggaggctgagacaggggactcgcttgaaccggggaggcggaggttgcagtgagccgagatcacgccactgctctccagcctaggtgacacaacgagattccgtctcaaaaagcaaaaacaaaaaaacaaaacaaagccccactcctccccacgtccccacctgcacgtcctaccgcgctccccctccttccccacgcgtcggctcagtggccttccttgttccgccctcgtacctactctaccctctgcttggtctctaattcttcaggtttcagcttaagtgcaaaccccttcctggccctttattcattccacagagaatttgtggagccctgactttgtgcattgtgttaggtattggagatagggcgcataataaaacggtctctgtgaagcttattgcatagtgggagagacatagtaaataatcacaaatacgtgtgaggttgcaaatgtgacatgtggaaagtcaatgctgtgactgtaactggagaatgtgacctcatcagggaagtcttcccagcagaagagacttgagctaagatctgaaggataaacaggagttaagtagtgaagacaggagagaaggatgctgcagatggagggaacagcttgtgtaaaagtccagagagcaagggactgaaagagctgccagtgtgcacaggaagggagtcagtgtccttgtttcctccatagggcattttatcacgtctttttttttttttttttttttttttgagatagagtcttgctctgtcgccaggctggagtgcaagtggtgcaatctcggctcactgcaaccttagccttacgggttcaagcagttctcgtgcctcagcctcccaagtagctgggattacaggtgcacaccaccacacccagctaatttttgtatatatatatatatttttttttttttgagatggagtcttgctctctcgcccaggttggagtgcagtggcgcaatcttggctcactgcaagctccacctcccgggttcaagccattctcctgcctcagcctcctgagtagctgggactacaggcgcccgccaccatgcctggcttatttttttttttgtatttttagtagagacagggtttcaccatgttagccaggatggtttcgatctcctgacctcgtgatccgcctgcctcagcctcccaaagtgctgggattacaggcatgagccaccgcgcccggctaatttttgtatttttagtagagacggggtttcaccatgttggccagaatggtcttgaactcctgacctcaggtcatcctcccgcctcagcctcccaaagtgctgggattacaggcgtgagccactgcacctggcctcttttgttgttgttgaggcagagtctcactctgtcacccaggctggagtgcagtggcatgatctcggttcactgcaccctctgcctcctgggttcaagcgattctcctgcctcagcctccggagtagctgggattacaggcacccgctaccacacccagctaatttatttttgtatttttacagatgaggtttcaccatattggcctggctggtctcaaactcctgaccttgtgatccacccgcctcggactcccagagtgctgggattacaggcgtgagccaccacgcccagcccttttttttttttttttttgagacaaagtctccctcttgccaggctggagtgcagcggcatagctcactgcagcctctatcacctgggcttgagtaattctcccacctcagccttcccaggagttgggaccacaggcatgcacattttttgtagagatgaggttttgccatgttgcctgggctggtctcgaacttgtgggttcaggcaatcctcctgcctcagcctcataaagtgctgggattataggtgggagtcaccgtgcctggccacatgtttgtcattttttgtttacttgtttattgttggcctttgccactgcagcaggtttcaaccctggatagacattagaaccacccagagagctttaaccagtgctgtttcctgggcgctatgaaagaccaattgcaccagcatccctggagctggacctgggaactggtgttgcttaaatcttccccggtggttctcacgtgcagcgtgagttgaggacccctgcctcctggaagctccatctcggcaggaccatatcctaggacttggcacaggtgagtgtagggacgtaggcagccgaaagtggcaaagagtgaccctggaaggatgaaaatcaccaagtgataagaggacaaagagggctgggtgcagtggctcacgcctgtaatcccagcactttgggaggccaaggtgggcggatcacaaggtcaggagttcgagaccagcctggccagcatggcgaaaccccgtctctactaaaaatacaaaaattagctgggtatggtggtgtgcgcctgtgatcccagctacttgggaggctgaagtaggagaattgcttgaccctgggaggcggaggttgcagtgagctgagatcgcgccactgcactccagcctgggcgccagagtgagactccgtctcaaaaaaaaaaaaaacgaaagaggacaaagaaagttcttaagcccagtgggttgacacactcatcccagtgactcaggggagggctgaggtgggaggatctcttgagcccaggagtacaaagctgcagtgagctatgattctgctactgcacactacagcctggacaacagagcaagatcctgtctctaaaaaaagaaagagttctcaaagcccattgaaagagccaggcacagtggtcgtgcctgtaatcccagcactttgggaggctgaggggggcaaattgcttaagctcaggagttcaaaaccagcctgggtgacatggcgaaacccctctctacaaaaaagctgggcatggtggcatgtatctgtagtaccagctaatctcgaggttgaggtggaaggatctcttgaacccacctaggaggcagaggttgcagtgagcagagatggtgccatggcactccagcctgggtgacagagtatgtctcaaaaaaaaaaaaaaggccagacgcggtggctcatgcctgtaatcccagcactttgggaggccgaggtgggtggatcacgaggtcaggagatctagaccatcctggctaacacggtgaaacccgtctctactaaaaatacaaaaaatgagccgggcgtggtggcgggcgcctgtagtcccagctacacgggagactgaggcagaatggcgtgaacccgggaggcagagcttgcagtgagccgagaccgcaccactgcactccagcctgggcgacagagcgagactccgtctcaaaaaaaaaaaacaaaaaaaacaaaaagatgaagacattggattggggcagtggcttgggcccaggtgatctcaaaagccctttcagataaaggacagtaagtggggtgaaagtggctgtgtcacagaactgtcctaatctagtgtctggggcatgtgctgccttcctccagccacctaggcaccaagaggttgcctgtggttgtcctctaaagagggcaggattagtccaagttcgtaagtgtttagatggtctgtaactgatcttcatgcatgaatacacaaagcagtttctagggttcctaacatcatagcttaaacttccagcctgtagcatttgatctataagcaatacatcagtatggaagagagtctgttcttaagaactcttctggccaagaaagactttttatgattccttttaacatttttttaatattaaaaaaaaatggtagggacagagtcttactattttgtccaggctggtcttgaactcctgggctcaagtgattctcctgccttggtttcctaaagtcttgggattacaggcgtgagccaccacacctggccttgtgattcatttttaattaaatagttactatgtcctggccagactcggtggctcacacctgtacttccagcactttgcaaggctgaggcgggtggatcacctgaggtcaagagtttgagaccagcctggccaacatggtgaaaccctgtctctactaagaaatacaaaaaattagccggtggatggtggtgtgcgcctgttgtctcagctacttgggaggctgcagcaggagaatcacttgaacacgggaggtggaggttgcagtgagccgagatcgtgccactgcactccagcctgggcgacaagagcgagactccgtctcaaaaaaaaaaaaaaaaaaaattactgtgtccctccaagtcaggtaacgtgcgttatacttcagagacaatgggtaacactcagtcctagttctgagatcttataatctgatgataaagatctcaagaatgcaattaaaaaattaattgtgggggaaaaaatgacaaaatttagcatcttaaccatttgtaggagtaccattcattactgttaagtatattcatgttggggtgcagcagatctttagaactttttaatcttgcaaaagtaaaagtctacacccattgaactcccccagctcccccatgttatgggtgaagtaaacaaatattttagaggaatttctacaatggcaagaagtcatgcttttgtaaaatgcaggatttactaatgtgtgtgtgtttcttttctcgtatagaacaagttccttgaagtcaaggaacccatcctgacatgcatcttgacactcggcctgtgatcactcagttcagtgaatcttgacactgaccatgtgatcacttgtgccaggatgggaaggactggggaggtgggtcacagcaaggaattaagcaggctaaggggaagtaaagccacattaccatttccttcatgccttactttcctcactttggacagagacatggatacaggctactatgtgtggtggtgcaggttgttcactgcacaaggtcatccaactgaggtggtgcaggttgttcactgcacaaggtcacccaactgaggtggtgcaggttgttcactgcacaaggcatttcacaatgtcgtccactgggcaagtgtggctgacatcctgcactctgctcaccagccaaggagtgactatccccaagtctaggctggggacagagaaggtttgggtcctgcaaagggctgggaaaaactccagctgttgggccccatgacgcttccccaccagtggtccttctcttaccttgctggtgagattgggcctctctcatttccaggtcatgggtcagttctggggggaaagaaaagaaaaggcagtttgtgtgtgtgtgtgtgtgtgtgtgtgtgtgtgtgtgtgtgtgagagagagagagagagagagagatcatggaattacagctcagtaaagtggcaataaggatctttagaagccacctccacactattttaccgcaaccctgcaagggaaagagatgaagagatgtgtccagggcacagcctgaacctggccagcttgactccaagctcagaaatcttcccagctccagctttgagcctgggttcggagtttagttcacccctcgtgggactgaggagcctggcttgttttggggctgggggactatctgcctttcctggggtgatatgccagccagtcaaagcagttctggaggacccttgccgtgcagggctttgaccctttcgtgtttagctgatggccgctggagtgtccagaactgcctggcggcactggaggcaggctcggcagtggctacttaccagtctggacacttgcttttcactattttgacagccagtaccgctgagcctgtgttattacctgaacatcagcgctgccccttcccaagccccagttgcgccgtattccccacggcagggagaagggcttcgagcaggacggtgcggtctattgatgggggccgggcttggcactgagggggtggagcgggcagcctaggagccactcaagggcactggtgcaggagcagtttcctcctgggtgctgcagcccagctgccacccctctgcctgcctgtccccccagtctccattccttagtgtcccccaagccccatttctcagcccaggtgagtttgataatttttccagccccacccccactcccccaactccaccagggctcaagaactggtacaagggcagaaggaagccagaagccacagctgcctgtgatgcagaccgactcgggggcacctgtgtacacctgcagggacacagtctggtgtccacggggaggaggtgtgaaccgggggttggggaaggaaggcggcacatctctgggaccaccacccagcagcgccttcaggggccttgtgacccctctgcccctcctcctcactgccctcaccggctcttccagagacccagggctttgccagaggtgccttctctgaggaggccggttgttgcttggaggcaggcagctcagggtgcctgagccttctgctgttaccagagtctgaacctgttccctgaggcacctgtgaggactctgatgcttctacctccagggcttcctgggaccaactggcccctccttcaaggccttgtgatgtagcccagggaccttggcctaggttcagggatttgggagcagggataccttggctccgccattaactccctgtgggtggtttctcttcagcctttcaacacaggacttgggggtagggagataaaaatctcagctgggctatagatgagcgtgctgtgaggtcagatacgctgtgtgaccttgggccagtaacagcacttctctgagcctcagttttctcgtctggaaaatgggggcacaatagcacctttccaagaggctgtcgccaggattaaatgagaaaaaaacagcgggcttggcccagggctgagttggtgctgaacgcgtgtgagcagttcttatcaatcaggctgcttcgccaccccagaacgtacccacctctcaagcccttcattctgagtcctcacccatccttagccagctccctgggcagcctatcccttcagctcctacaccagcctctcctctctcccaaccgcctcccagctctgggtccctctttaatctccttccccttatcttctcccttctcatcacctcctccttgggggaaaggccttattcagtcatttcagccccaagagtggctgctctagcctagcctagttattttcatctccttaataacctagaggtggctgggcgtggtagctcatgcctgtaaagccagcactttgggaggccacggtgggcagatcatctgaggtcaggagtttgagaccagcctggccaacgtggtgaaaccccatctctactaaaaatacaaaaattagccaggcatggtggcgggcacctgtaatcccagctacttcggaggctgaggcaggagaattgcttgaacccgggaggcagaggtttcagtgagctgagatcgtgccactgtactccagccagggcaacagagcaagactctgttgtaaaaattaaaaaaaaggccaggcacggtggctcacgcctgtaatctcagcactttgggaggccgaggtgggcggatcacgaggtcaggagatcgagaccatcctggctaacacggtgaaaccccgtctctactaaaaatacaaaaaattagccgggcgtgttggcaggcgcctgtagtcccagctactcgggaggctgaggcaggagaatggtgtgaacctgggaggcggagcttgcagtgagccgagatcacgccactgcactccagcctgggcgacagagcaagaccctgtctcaaaataaataaataaataaaaataaataaataaataaataaataaataactagtaaaaaaaaaaaccaaggggtttcaggcccatacccatctgagaagcatggcgtgggtgagggcgctctgttcctgcctgctccacattttgggatctggcccgtgtcctaaaaagagccacaagttctcagaattagggcaaaacagaaagaaatgacaggagctgctatggtgtcttagggtttcctcttctcttttttttttttttttgagacggagtttcactcttgttgcccaggctggagtgcaatggcatgatctcggctcaccgcaacctccgcctcccaggttcaagcgattctcctgcctcagcctccctaatagctgggattacaggcatgtgccaccacgtccggctaattttgtatttttagtagagacggggtttctccatgttggtcaggctggtctcgaactcccgacctcaggtgatccgcccgcctcagcctcccaaagtgctgggattacaggcgtgagccaccgtgcccagctcctcttctcataattttgttattgcaatgaaaaggtggcatcaggcagggctgagatacttgggccattcttgtcccccaggctggcctctgctcccgtccaatcttcaggggagattagaatgtggcggctgaccctgtctgtggagccttaggaagctgtgatggctgaatcaggaccactggcttttttttttttttttttttttttttttttgagacagagtttcactcttgttgcccaggatggagtacaatggcaaccatcttggctcaccacaacctctgcctcccaggttcaagcgattctcctgcctcagccttccgagtagctgggattacaggcgtgcaccaccacgcctggctaattttttgtatttttagtagagacggggtttcgccacgttggccaggctggtcttgaactcctgacctcaggtgatccacccacctcggcctcccaaagtgctgggattacaggtgtgagccaccgtgcctggcctccagctggatttcttatctgtctcctttaagtgatgctttatccatcaactagaaccttccatgagcttttggcttcccacctttcgacctttgccgtgctgttcccttcatctggaatactctcttcactcccctttctcctgtgatatcttggcatgtccacatgttacgcagcctccagggagttgaagcaccccctcctctggggagcctcggaggctgggcctcctccttcagcacctgctcctcaagctggacatgctcctgcccatgaggtcctgcttgatttctgctctaccttaataccaccagttggcctgtgtgtctccctagctagaccgagggctgggagttgcttggtgaagagtgactcggaaaggatgggaacctccaggatttggatcctaggagtcctccactccctaaccagagctttttttttttttgagacagagtcttgctctgtcatctaggctggagtgcagtggcgtgatctcagctcactgcaacctccacctcctgggttcaagcgattcctctgcctcagcctcccaagtagctgggactacaagcgcccaccaccgtaaccagctaattttttgtattttagtagagatggggtttcaccatgttgtccaggatggtcttgatctcctgacctcgtgatccgcccgcctcggcctcccaaagtgctgggattacaggtgtgagccaccgcgcccagccctaaccagagctctttgctgtgaaactttcagatgtttctagaacttttccaacttctctgtccatctcacctccccaagtcccagtttccttaatcagaaaaagaggcagcagaatcggtgcagtgtgaggctcacgggggctgttggtgggcacaacccagagacagtggttgtgatgatgacagtgacctctccccacccgtccagccgcctctcctggcctcacctgagcagcgtttctgcagcctcaggatctccaggtgcaggtctcgcagcagggccatctgctcctttttcaggaagctgatgtggcgttgcacgctctggatctgatgctccagggacacggtatccatggcaacccaggcctgggccccacctagggaggacgacaaggtgaacccacctcttctgagcccatctgcgctgccccaccctcagctctttcactgtctcctccgctctaggtcctgttgccaccaggaagatgattctgccactgctgtcacctccacactattccttcattcaggcttcatgaagaagcaggggagttggcaggaaagcatcattactctcatttaacacatggagaaccagaggcccagagggcaatggcttccttctcctgttcccatgtaactttttttcttttttttgagatggagtcttgctctgttgcacagactggagtgcagtggcacgatcttggctcactgcaacctccacctcctgggttcaagcaattctccttcctcagcctcctgagtagctgggattacaggcagctgccaccatgcccggctaatttttgtatttttagtagagacagggtttcaccatgttggccaggctggtcttgaactcctaacctcaggagatccatccgccttggcctcccagagtgccaggatgacaggtgtgaaccactgtgcccaggcccatataactttagcctcttctacttctcaaacaggaaaacaaatggagtggcaaagtcagtagagagacagagaacctgggttctagcctgctcctcccgccctagcagtgtgacctgggtgagccctttccctctgtgggctctcaagtttctcaggggtaaaatgagggagatgtggagtgagtgagccctagagtctcttccagttctgacaccctgcaagtatctcagcccaagggctacatggctgttctgaatattattctcccttagttcaactccacttcaacttcaccacagtccagggctccaggctcctccaagtggcagaggaggaagatctggtgaatgtttcactaacactgactctgggctgaaggcaggtggtggagtccctttgtaaaagagaaaggcgggccgggcgcggtggctcacacagtaatcccagcactttgggagcttgaggtgggaggatcacaaggtcaggagttcaagaccagcctttccaacatggtgaaaccccgtctctactcaaaatacaaaaattagccaggcttggtggcacgtgcttgtaatcccagctactcagaaggctgaggcaggagaatggcttgaacccgggaggcggaggttgcagtgaactgagaccatgccactgcaccccagcctgggcgacagggtgagactctgtctctaaataaataaattaaattaaattaaattaaagaaataggccagccgtggtggctcactcctgtaatcccagcactctgagaggctgacgtgggaagactgcgtgagtccaggagtttgagaccagcctgggtaacaaagtgagatctcgtctctaaaaatatatatccataggccggactcggtggttcacgcctgtaatcccagcacttttggaggccaaggtcggcggatcacttgaggtcagttcgagaccagcctggccgacgtggtgaaaccccatctctactaaaaatacaaaaaattagctgggcgtggtggggcaggtgcctgtaatctcagctactcgggaggctgaggcacaaggattgcttgaacccgggaggtggaagctccaatgagccaacattgcaccactgtactgcagcctgggcaacagagtgagactctgtctcaaaaaataaataaataaataaataaataaataaaatacatacatacatataaataaatacaataaaaaagagaaataggagaggggaagagagactcatgcagtgactcccatggcagaactttgagttgcagtgatggatgagagccatgcatccctgaatcctaatgatggcctggctttccagctctgctgcttctggctccgcccccttccccatgactctgttctgtgataatcagcatcttggacaagcagaggcagaccgcgaacactggagcccaggacttagagctcctgctttctcagccaaggactccctaagctttggaggaacctgccttcacctgcccctggaatgtcctgggcagtgggagagacaggccagtaagatgagtaattctgttcaccaaatggtcccttccagactagcttacatgtaagactcagaaaaatccagattttcatttgtggggttacatcgagcaggtccccctgagaactccaatcctcagggcactcctctctctgggcccctttctctggtactcccctgacccccctaatccaaccaaataggcctttctttttttttttttttttttttttttttgagacggagtcttgctctgtcacccaggctggagtgcagtggcacgatctcggctcactgcaagctccgcctcccaagttcacgccattctgcctcagcctcccgagtagctgggactacaggcgcccaccaccacgcccggctaattttatttttgtatttttagtagagatgggggtttcaccatgttagccaggatggtctcgatctcctgaccacgtgatccacccgcctcggcctcccaaagtgctggtattacgggcgtgagccaccgcgtccagccatccaaataggcctttaatttcagcaaggggtggccctttggcctgtggggatcgctggctacatgtgctgaccatctgctatgttcagggaacattatacacatgatcttacttctgccaaccactcttcagcgggtattaccaccccaccccacttcacaaaaaagggctctcgtaccgcttcacacgctcagtaaggggtggcagagccaattctccaaccaagtcttacgaatccagagaaggttcccaatatttacacgaatatttacactgggaacagtcctaggtttgaatctgtcacccaggctggagtgcagtggggcaatggtagctcactgcagcctcaaactcctgggctcaagcaatccttccacctcagcctcccaagtagctaaggtctacaagtgactgccaccatgcctggctaatttttaaaattttttgtagagacagggttctctacacccaggctggtgtccacctcctggcctcaagcaatcctcccaccttggtctcccaaagtgctgggattacaggcatgagctgctggatccagctgatttatggctctttcagttacctgctgtgagacttttggcaagaaaattaacctctctgagccattttccttccccctgtaagatggggctgcaaatcctaccatcctaggatagttgtaaggattaaatgagataagaaatgtaaggcctgggctgggcgcagtggctcacgcttgtaatcccagcactttgggaggccgaggcgggcggatcacgaggtcgggagatcgagaccacggtgaaaccccgtctctactaaaaatataaaaaattagccgggtgtggtggcgggcgcctgtagtcccagctactcggagaggccgaggcaggagaatggctgaacccgggaggcggagcttgcagtgagctgagatcgcgccactgcactccagcctgggtgacagagcaagactcgtctcaaaaaaaaaaaaaagaaaaaagaaatgtaaggcctggcacagtggctcacgcctgtaatcccagcactttgggaggctgaggcgggtggatcacctgaggtcaggagtttgagaccaggctgaccaatatggtgaaaccctgtctgtactaaaaatacaaaaatcagccgggcatggtggcatgcacctgaagtcccagctactcgggaggttgacccaggagaatcgcttgaacccagggggcagaagttgcagtgagctgagatcgagccactgcactccagcctgggcaatagagcaagactctgtctcaaaaataaataaatagggcgggcgcaatggctcacgcctgtaatcccagcactttgggaggccaaggtgggcggatcacgaggtcaggagatcgagaccatcctggctaacatggtagaaccccatctctactaaaaatacaaaaaattagctgggtgtggtggcgggcgcctgtagtcccagctactcgggaggctgaggcaggagaattgtttgaaccagggagtcagaggttgcagtgagctgagatcgcgccattgcactccagcctggcgacagagcgagactccatctcaaaataaataaataaaataaaaataaacaaacaggctgggcgcggtggctcatgcctgtaatcccagcactttgggaggcagaggcaggcagatcaggaggtcaggagatcaagaccatcctggctaacacagtgaaaccctgtctctactaaaaatacaaaaaaaattagctgggcgtggtggcgggtgcctgtagtcccagctactgaggaggctgaggcaggagaacggcgtgaacccgggaggtggagcttgcagtgagccaagattgcgccactgcactccagcctgggctacagagcaagactcgtctcaaaaaaatagatagatagatagataggtgatagatagatagatagaataaagaaatgtaaagtgcttagcacaggacgtagctcagtcaatgctacctcccttcttcctcttcttctctgtccatttaatgtctgagtaggttaattcctgtcttgatttgctcactttctcattcactcatttagtgatctactattgccaagcactgtcctgggtttggggaacacggtaacgaacacagtgaagtccctgctctcatggatctcacggggtgaagagaagagaatcaaacacataatgtgtcaaacagataatacaaataaggatagaattacaatctgtgataagggccactaaagagacctacaaggtaatgtgaaagaataaagaggggaacctgctttagatttgaggtgaggaaagttctctttggggaagtaacttttaggctgtaactttctgccttgtgacaggcagagttccaggacggtccccaagattcccagcctctggtatgcagctgctctgctcgagtgtgggtgggcctgcgcgtatgatggatttcacccctgtgattaggctatacacaaaggtaaagggatcctgcagatgtaattaaggcctccaatcagttgactttgatttaatcaaatggagattattctgggtgggcctgacctaattaggcaaaaccctgaggctgggcacggtggtttatgcctgtaatctcagcactttgggaggctgaggcaggctgatcacttgaggtcaagagatcgagaccagcctggccaacatgggtgaaatactgtctctactaaaaatacaaaaattagctgggcatggtgacaggcgcctgtaatcccagctactcaggaggctgaagcaggagaatcacttgaacccaggaggcggaggttgcagtgagccgacatcgtgctactgcactcaagcctgggcgactgagtgagactccatctcaaaaaacaaacaaaacaaaaaacaaaaaaataagagccccgagcagaggacctagtttaaaaatggtagactaaggccagacgcagtggctcacacctgtaatctcaccactttgggcaacatgatgaaacctcgtctctacaaaaatacaaaaattagccaggcatggtggcatgggcctgtagtcccagctactgggaggctgaggtgggaagatggcttgggcccaggaggtcaagtctgcggtgagccatgattgtgccattgcacttcagtcctggtgacagacaaagaccctgtctcaaaaaaaaaaaaaaaaaaaaaaaaaaagagccagactcctgggcttagacattgtaagataataaatgtatgttgttttaagccactatgtttatgataatttgttacacagcgataaaaaactaatacagacttgaaggaggggtaggacttagaagaatgaagggaagagcacctccaacagggaacagcatctgtgaaggcacagaggtaggaaagaagtaagtgatcacaatgatagcttacatttacagaacgcttactatgtctcaaactttctgctaagtgcttcacgtggtctgtctgagaaacagacattgccgctgctagtaagggctgaggtgaaaggtactgaaggagggtcgcaggaaggaaggttagcaagagtaggttcacatggcgtcttgaaaaccatgttaagaacttttgggctgggtgcggggtctcacgcctgtaatcccagcactttggaaggccaaggcgggcagatcacctgaggtcaggagatcgagaccagcctggccaacatggcaaaatcctgtgtctctactaaaaatacaaaaactacccaggcgttgaggtgtccacctgtagtcctagctacttgggaggccgaggcaggagaatctctttttttttttttttgagatggagtctcgctctgtcgcccaggctggagtgcagtggtgtgatctcggctcactgcaagctctgcctcccgggttcgcctcattctcctgcctcagcctcccgagtagctgggactacaggggcccacgaccgcgcctggctaattttttgtatttttagtagagatggagtttcaccgtgttagccaggatggtctcaatctcttgacctcgtgatccgcctgcctcagcctcccaaagtactgggatcacaggcgtgagccaccgcgcccggccaggagaatctcttgaaaccaggacgcggaggttgcagtgagccgagatcacgccactgcactccagcttgggcgacagagcaagactccatctcaaaaaaaaaaaaaaagaacatttaatattaagtaaatttggaagttcttaaaggattttaagcagtggaagaacatgatatgatttgcattttttattttttttgagacgggatctcactctgtcacccaggctggaatgcagtggtgtaatgatggctcattgcagcctccaactcccaggttcatgctgagactctacctcagcctcccaaggagctgggaccacaggctcgtgcccccgtgcccggctaatttttcacttttgtagagatggggtctcactatgttgcccaggctatcctttgcatttttaaagtatcactctggcggctgtggggagagcaatctagagccaacagagtggatgtggggaggtcagctggaagaataaagcagtggtcaaggtgccaggtgatggtggcctggatgagatgatggaggtgaaggcggagagtggtcctaggtgtattttagtggtaggactggcaggacttggagatggattggattaattcatgatgatagggagggggatggctaagatatctccagttttccagcttaagcaacccaagaatgaaggcatatttgctagatctttccccatttcatcctctttcaccatgaatctcttctttatctataatcactccctgggtgttcttgtcccatcccatggctgtaaatactatttatatgctattgaccgccaaaataactcttccctggctgctagactgatgacctaacacctccatttggatattcagtgaggatatccctcaaactttcaagtcccaatactgaacttgcattcccttctgcaaaccaggtcttgaccactgttcgccatcttgataaaccacattgctgtttgcccactcattctgttgctcaggccaaaacttgggagtcatgtttgattcctctctttctttatattccatagtcaatccatctgcaaatcctgtttgctctaccttcaaaaaacatatcccaaagccagtcacttctcactatctccatcgtcatcacccaagtccaagccaaaaacatccttctggtgtaccattgcagtaggctcctgactgtcatctcacttccattcttgccccttgttttccatgcaggagccagaattcctttaacaaatataagtcgggtcaggcacggtggctcacgcctgtcatcccagcactttgggaggccgaggcgggaggatcacccaaggtcaggagttcgagaccagcctggccaacatggtgaaaccctgtctctaagaaaaatacaaaaaattagccgggcatagtggcacatgcctgtagtcccagctacttgggaggctgaggcaggagaatctcttgaacccgggaggcagaggttgcagtgagccgagatctcactgctgcactccagcctgggtgacagagcgagactccgtctcaaaacaataacaaaaacaaatataagtctgatcatgtctccccaaaccccactcaaaatcctctgtgtggctttccatcacatttaaaacaaacccaaagttcttatgagcccttgcacagtcttccctggctccctctgtcctcatcctgctggttccaccccagccactccgaccttgcttcttcctgaatgtgcccagcacactcttgcctcggggactttgtacatgctgtcccctctgccaggaatgcccttcaccaagatctcctcaaggcctattcccctccttcattcaggactctccaaatgtcagctcctcagggacttgctctcatcacccaatttaaaatagaagcttttgttactctgcattcccttaatctgcattattttttcttccgtgaatgtattaccacatgaatatattaactttttatttttatgtatttttttttatttttttgagatggagtctggctctgttgcccaggttggagtgcaatggcgcgatctcagctcaccgcaacctccacctcccgggttcgagcaaatctcctgccgcagcctcccgagtagctgggattgcaggtgtgcaccaccatgcccagctaatttttgtatttttagcagagatggggtttcaccatgttggccaggctggtctcaaactcccgacctcgtgatccaaccacctcagcctcccaaagtgctgggattacaggtgtgagccacggcgctgcacccggcctaaatttttttttttcattttttattttgtagagacaagagtttcactgtgttgcccaggctgacctcgaacttctagtctccagcaatcttctagctttggcatctcaaaagtgctgggattacaggcgtgagccactgcgctgcacccggcctaaattttttttatttttatttttatttttgtttttgtagagaccagagtctcactaggttgcccaggctgacctcgaactcctggtctcaagcagtcttccggctttggcatctcaaaagtgctgggattacaggcatgacctcctgcttccagcccccggtttttgtttattgtctgtttctcctgccagattgttagcaactgagatgaaggacattgctttggttcctccttttccttagtacctagcacagtatgtggcaaacaggaagtactcagtaaacatctttagagtgggtgaagttgtggggatggggtagactgatggagaagcagattgacacaaggtaagatcaagatgccatgtgttaggggtgatatacccaagagacctcaaacaaggagaaatagatgtcaagtaggcaggtcaatatactggtgcaaccaggctcagtggctcatgcctataatcccagaactttgggagacagaggtgaacagatcgtgtgtgcccaggagtttgagaccagcctggaaaacatggtgaaaccctgaaaccccgtctctactaaagatacaaaaattagctgggcgtggtggcgtgtgcctgtggtcccagcgtggaggctgaggtgggaggattacttgagcccgggagtttgaggcttcagtgagccatgattgcaccactgcattccagcttgggtgacagacagtgagaccctgtctcaaaaaaaaaaaaaaaaaaaaaaaagataaaataaaaacataataatacactggtgcataactcaagagaaacaggtgagctgctgactgtgagtctatgtcagggtttgtgtgcttgcgtatctgtatgtgtgcctgagcctgcgtgtgtgcctcaaggagtacgtgtgtgtgtttcccgattctctttgctgctgtgtgtctgctgtgcgcacatctggaggatgaaggtgtgtgggcctgttcttaggataaagagagaaacgtctgttcccagccactgaaatgcaaatgtttctgaagagtaaaaacccttcccacacagctctggagactggaccctggccaccgtgagagactgagccaaccagctgtttctgtgctttcccagaacgacttgagtatttgcttccaactaggcaggctgcttttctcagggaggaaatttgggtcacaaacgatcttggcaaatattctttcttagacgttattgtttagtttgtttgggggagggtgggagatagagtggggaagggaactagtgacaacaaaaatctctctgtctggctggggagttgcaggcactacttcagaaggcctaagccaggaaaacgtccgattttcccatcagaaatgcagtcctggaacatctggccttcagaagctcatgcccgaggacttgacccaggccagtaacagtagctgaagggctggagctgtcagctccatctttccccccgacacagcactagatgtccagcctcctgagtgaacacactcggggaagaggtcacactcctctgtccactgtcctgagcacctcagagcctgcattgtttctgcttccctccttcttctggttctctgagttctttttcctgttaattttctcttccccttgtccttctccttctccttcttttttttccccccgagatggagttttgctcttgttgcccaggctggagtgcaatggcacaatctcggctcactgcaaccttcgcctccccgattcaagcgattctcctgcctcagcctcccaagtagctgggattataggtgcccaccaccacgcctggctaatttttgtatttttagtagagacgtggttttgccatgttggccaggctggtctcgaactcctgacctcaagtgatccatttgcctcggactcccaaagtgctgggattacaggtgtgagccaccgcgcccagcctttcctgttaattttctagcttgatgaaaaaatattcatttaaaaaaattgttaccaaaaatattaaaaagaccctaacacaaggttcacaatttataggattaattccaagtacttttaacatgtctctgatgtgtctgaaagttacaaatacttttccctttggggaagttggtggagaaggcttctgtgctcaggtccccaaacacgggtagagtgtcagactcaggaaccttctgaccctggcacagttgggactctctgaggtccgggctcctgatccctgaaaatgacctctcttcctgcttgtttctggagattctgggtacccacttccctacccagttacaactgacttggcaagtgggaaactacagttctctccctgcttcagctgtttgtttttttgagacggagtctcctctgtcgcccaggctggagtgcagtggctcgatcttggctcactgcaacctccgcctcctgggttcaagcaattcttctgcctcagcctcccgagtagctggaattacaggcacccacccaacacacccagctattttttgtatttttagtagagacggggtttcaccatgttggacaggctggtcttgaactcctgacctcaggtgatccatccgcctcagcctcccaaagggctgggactacagatgtgagccacagcgcctggcctgctaaccagcagtttgaaaacctcttttacagtccaatatttccttgggtatctaaatctcaccttccccacaccctttttgtctgctccaggtcccctggcctctgccacctctttctttccctcaagcagaggaggtcgctggaagaggaaccagaccccacacttcttgtgacctgcttgcctggggtttgcattgtctgccacccctcactcactggcgggttctcttgtcccagtttcagcttttcctagtgtttcttttctgtttgggactgaaaatatttatcaagtcaacagatatctttgtgttgttcttaacagtcaatagccatgttttcttaaagttctttaagtatgtatgttttcttgttttaaggagaatgttagacttatttttattattcttatagtcagcgcgggtatattagataggacaagcatggcgataagtgaacaaataaatgaatcaggtcaggtgcggtggctcacgcctgtcatcccagcactttgggaggccgactggggcagatcacctgaggtcaggagtttgagaccagcctggccaacatggcaaaaccccatctctactaaaaatacaaaaattagcagggcatgatggcacgcacctgtagtaccagctactcgggaggctgagccaggagagtcgtttcaacctgggaggcagaggttgcagtgagttgagatcgcaccactgcactccaacctgggcaataagagcaaaactctatctcaaaagaaataatcaatatgaggtttatgtttcttagtcattattcctgttcatggcctgactcagaggcctggggcagtcggaaagcaggaactcaagaagcctttcttggacatggcatcaatgcataaataataatacttataataataagtaattggtactgttcttagcattttacatatattaactcatttatcttggcaacaaccccacgttgaagattctattaatgtatccactttatcgatgaggagacaggcttagaaaggtaaagtagtttgctcagtatctgcaactacagtgcctggcaactagaagcaccccactgggtgctcgtcctggcgtttatggcttctcataagagaatcccaaaggggagaagatcagcctgcatttagcagtccacatctgcaggctgatcttcttctcttttggattctatctcttgctgctctgatgacaaactcttccagtagcccagtagccaggccatcccctcacttactatatccaccctatctctgcctcttgaagcctgacccatccttcagggccttgctctgatgtgacttttaccatgaagccatccctgatcccccaccaagatggaacgactctctcccgcctctctgttccccaggcaatttgttggaatctgggtggcagctagcaccacagtctgccatattatcactctttgttctgtgtgtgtgtgtgtgtgcacgcatgcctgcacgcacctggcttccgtgcaaagccataagtcttcatcgtgtttgtgtgtgtgtgtgtgtgtgtgtgtgtgtgtgtgcatgtgcctgaatgcacctggcttctgtactaagccatacgcttcctgagggcaaggctttgtctctgggaatctcttgcaaggaacaggcccacaatgaatgctgctgaaacagggagaatggattgagtcttactgggaatcaccagggcaagtaaatacacatattaaaaaataagtatgctggtccctcaaccccacatccttggctttcctggggactggagtttggaacaaggattcagcctttgacaaatgtctaggactctgtctgcaaggtggggccgcttggccagtggtggagccacactccccagggaccttgtggtcctctccactccggagcccctccccgccgaacccctcaactctggctgccccctgcactgaagcgctcaggaccctccacctcagcaaagctgaggatccagtcacacgggaatggggtgtatggggaaactggagccccccacccccttcaggcttcaggttctgccctgattatgcctccaatatgactcccagggaaggcaggggttgggggggggatgtggagactaaggaggacggggaagcgaggtagcagagaggagggcaaaggcagcagaaataaaggtgtgcgtggcgggaggtggcggggctcgacctcgggccgctctggacgcccggcagtgccaggcagggcccgggtctgggcggtggaggacaacttctgccagcagcccgccgcgagtcctgtccgcctcccgcgcgctgcggtgcccagccccgcgccagccctcccgggggagctggagcttggccgcgctgctcccccctggggccgctccggcgcccacaccccccacgcccaccgaccggcctcctcaccttcgggacctgggagtcaccggccggcggggccctgggtccgggccgggctgggtgggggcggcgctcttccccccacgctagctgcgcccggggatctgcagcgcccgccccggctgcggcgccatcagctgctgggaggctgcggggcagtcgggccggggctccggggggctcgggggcgccgaaggggggtcgggggcgggctcgaggcgtaaacacccagcaacgtgaccggaactggcgaacgagccggaggggtgcggggggcgggagagagaaagggggaggggagggacctgagacgggcggggaggggccgtgggcggggcggggggaggggaggccggcggcgcgcggtcggggggagggggaaccccgggagccccgagagccccgggaaccgggcctgaggcccccagcgggccgctgggctcgcggagctggctttggctggtagctggaagggcaaactggggaacccgccggtgccttggcgcgcaggggcgcggcgaaggatcagcaccgcggacagcgcccaggccgccaggccgcgatccgctccgcccctcccgccctggcgtaggaaggagaggcagcgcccgcagccgcgcaggcaaggcttggggcgaagcgcgatctgaccagtgggctgggaatccgtcccgtgtctaggcagcagcaaacctgccccagacctctcactagctgtgtggccttgggtgagtcacatcacctctctgggccgcagttgataagatgccctatttctaaaattcttttattattattattatgctttaagttctatgagggtcccaagagccaagggaagattcttgataaactccaaagttcaggccgggcgcagtggctcacgcctgtgaggccagcagtttgggaggccgaggcgggcggatcacctgaagtcaggagttcgagaccagcctggccaacatggtgtatgtatcccaatctctactaaaactacaaaaattagccgggagtggcgggcgcctctaatcccagctactcggaaggctgaggcaggagaatcgcttgaacctgggaggcagaggttgcagtggccaagatcgtgccaccgcactccagcctgtgtgacagagcgagactctatgtcaaaaacaaataaacaaaaaaactccaaagttcagaacacgtgcgaggcattgctgttgatccgttttcaccaaacgtgggaggcttcaggagtcccactgtgtgcctcaaaagtgtggctgccctaatatcttcctcctgccgggggcttggtctcatctgtaaatgaggataatgatgatctatgtagctcataagatcttcgggttgttgtgaggattaaatgaattccttcctgtaaagtgctcagaacagtactgctgagtgcttgttaggcctctgtgctcatgacaagggatgaggtagcattgtgtgagtggcaggtggctcagagattgctctgggtaagtcattcctgtccctgcctggaggactgggctgagtggattcaggctaatgggttggtgcctggctttccccactccatggctagccaaataatccctggcctttcctcctggaccaaattttcagagaagccctgtaccttcagagctgggagacccggcacctacttgccacagaggccctggggaggcctcaaggggcaccctgcctctctatgggtccctttcctccctgtcctccccactttccaaaggttaactggactcaggtgtcaacaactaaaaagctttagctgctcctggaaaattctaatcctaaagagttgcaggggccaggctcagtggctcacggctctaatcccagcattttcggaggctgaggtgggtggatcatgaggttaggaattcaagaccagcctgaccaagatgataaaaccctgtctttactaaaaatacaaaaattagtcgggcgtggtggcaggtgcctgtaatcccagctactcaggaggctgaagcaggagaaccgcttgaacctgggcggcagaggttgcggtcagccaagatcacaccactgcactccagcctgggtgatagagtgggactccatctcaaaacaaacaaacaaacaaacaaacaaacagagagttgcaggaatgactgtcttaggtggcttgacaggctgcggggtttgaattttgttcaaaggcctctcaaatcccaccctgcaggaactctagctactagctgcactgtgggtggcccctcttcatcctgtctgaggaaatccttgggagaggaacagaaaggccagcctcacccctcttcctgtctcttgctgtccttcctagagggcagtattcctggactgtgctccttggacctgcatatcagtatctccagcagcagtgtgagttctgatgaaccatccatattccctccatttcatgagatatcggtaagaatgatgaaaggtatgttttgtatctccaaaaacaggtgatatgaaggagcctgaaaacctggcttctggccccagctctgttacttactacttgggtaattctgggcaagactcagcctctcagagctccagttccttctcagttaaatgggaagagtaacattgactctgccaacaggatccttgtgaggctgtcttaaggtacaagtgaaggggctgataaagtgcacatggatagaattgttatcaccaagtctcaaatgttcttctctttgatctgtgtcaggatgaatcctggaactctgtcttttatttatttatttatctatttatttatttatttaaggtggagtctcactctttcgcccaggctggagtgaagtggcatgatctcagctcaccgcaacttctgccccctgggttcaagtgattctcctgcctcagcctcccaagtagctgggattacaggcacgcaccaccaggcccggctaatttttgtatttctagtagagatggagtttcaccatgttggccaggctagttttgaactcctgacctcaagtgatctgcccaccttggcctcccaaagtgctgggattacaggcgtgagccacgaagcccggccctttttttttttttttttctgagatggagtctagctctgtcacccgggctggagtgcagtggagtgatctcagtttacggaaacctctacctcctgggttcaagcagttctcctacctcagccttccgagtagctgggattatagacgtatgccaccacgcccagctgatttttgtgttttcagtagagatagggttttgccatattggccaggctggtctcgaactcctgacctcaagtggatctgcccacctcggtctcccaaagtgctgggattacaggtgtgagcccctgtgcctggccttttttctactttcttttttttccttttccttttttttttttagaaacaggccctggctctgctgctcaggctggagtgcagtggtgcaatcatagctgaccaaagcctcgaactcctgggctcaagtgatcctccagcctcagcctcccaaagcactaggattacaggagtgagccactgcgcccagctctcttttcttttctttttatttttgagacagggtctcagtctgttgtccaggacggagtgcagtcgtgcaaacacagctcactgcagcctccacctcctgagctcaggtcctcccaccgcagcctcccaagtagctgggctccaggcgtgtgccaccatgcctggctaatttttgtagttttttgtagagatggggtttcaccctgttgcccaggctgatcttgaactcctgggctcaagtgatctacctgccttggcctcccaaagtgctgagatgacagcgctttgctgggattagccacggtgccacaccctggctccatttccaaaattaaacttgtaacaaagtaaaagaaaactaaagtttagaaaaagtgtacctcttgcttccgaagccacgattactttgagttgagcactttaccaatgggatctcatttaaacttcagataaatcgtattggaaaggtttattcccattttcagatggagagaatgaggttgaatttaacatcacacagcttggaaatggcagagccaggattcaaactccagcccagcctggcccagagacaagcttgtaaccacagcatcctcacgcctgccagagagaacatgagtccagctgtggcagccacagtggtcatagcttaaagggaaggtaagggccaaagtgtgcaaggcctggaatgccagctagaggaatgaggcctgggtggcagagaaggcctagagtctcctccatctcttcatgacagtcagaaattctgactttctcagtttagtttgggtaacagttctgtattggttagcatcctggcagggaacagatggcacatttaaaatggacaatttggctgggcccggtggctctcacctgtaatcccagcactttgggaggccaaggtgggcagatcacttgcggtcaggagtttgagaccagcctggccaacatgacgaaatctcgtctctactaaaaatacaaaaattagccaggtgtggtggtgggtgcttgtaatcccagctactcgggaggctgaggcaggagaatcgcttgaatccaggaggtggaggctaatttttgtattttttagtagagatggggttttaccatattggccaggatggtctcgatctcctgacctcgtgatctgcccgcctcggcctcccaaagtgctaggattacaggcgtgagccaccgcgcccggccgtatatatatataccacattttgtttatccattcatccatcagtgaacatttaggttgcttccacctgttggctattgtgaataatgctgccatgaacacggggcacactttcttttcttttcttttttttttcttgagacggagtctcgcactgtcgcccaggctggagtgcagtggcgcgatctcggctcgctgcaagctctgccctctgcctcccaggttcacgccattctcctgcctcagccttccgagtagctgggactacaggcgcccgccaccacgcacggctaattttttgtatttttagtagagagggggtttcaccatgttggccaggatggtctccatctcctgacctcgtgatccacctgcctcggcctcccaaagtgctgggattacaggcatgagccaccacgcatggggcacacattttttaaaccagtttgacatttgacatatatatatatatatattttatatatatatttagagaccgggtcttgctatgttgcccaggctggagtggcagcggctattcccaggtatgtttatagcactcaacagacttgaactcctggctcaagtgatcctcctgcctcagactcctaagtagctgggactacaggcatataccaccacacctggctgacattagccttttaattttgcttattgtgtttttgtgatgtgcagatattaaacatttttattttagccaaatccattaatctcttcctttatggcttctgccactgatgtcatgctaaaaaaaaaaaacctatcctcactttaatataatgacaatacttatccacgtttttttcttttctttctttttttttttttttttttttttttgagacagtcttgccctgttgcccaggctggagtgcaatggcgcgacctctgctcactgcaacctccgcctccccggttcaagcgattctcctgcctcagcctcccgagtagctgggattacaggcaggcgccaccacgccccgctaagttttctatttttagtagagacggggtttcaccatgttggccaggttggtctcgatcgtcttgacctcgtgatccgcccacctccgcctcccaaagcgctgggattacaggcgtgagccaccgcgcccggccgagtagtttacttctttaggcatcacttcctgggtagaacgggtttcctaagggagtaaggcacagaacgaggcaatgggccgcctggtctctccgcgcgtcagtaggactcggggaaccagactccgcccagtgctccccagaaacccggctcctcggcgcggcggggagagacccggacggggagaggccgctgtcccgcccgttctgcggggccggcgctgacccggctccagccgcctccaggggcggggtctgagcgccgcgccctccccgcgccctccccgcgccctccccgcgccctccccgcgagcgcgccccggacacccgcctgcggcagccgagcctcctccaccgtgcggcccgcggagggcagggagcggccgggcgaggcatggcgggccgccgggcgccgggggagaagcgctggcagctggtgcgctggtgagtgggcgccgggcggcgcggggcctaatgcgggagcgaaccccgaggcccggccggcgcgggaagcagcggggcgcgggcccaaagtttcgtcccgggctgaggctgcggggcccgggtgggcggaggggcgccggctgcctggtccccaccaccccctccggtccccaccaccccgcgtccccgcgccgggtctctgcggctctccaaagagatgggcgacggggaccctgtgcgagccgtcaggctttgggggaaccccgtccccctcccgcgggggcgccctttccctgcacttcacctttcacgctcgcacggggcttccgccttccccttcgcccccttcaggtttcccatttgtgcctccctccgttccttctgccacccggggcagggctctggacttgggccccgagaaggcaccacccacagcccccaacccctgcgtggaaaggggtgctttagccccgaaacacaggagcccctgggggtgtgcactctggggacagggcgcagagaagggggcctaggagaccagggcaggggaggggtccccgtgtagcggggcagtcgccctttccccctccgcagtcctggcccgctgggaagtcagagcctgcggtgtcaggttaccggactgcaagctcagagggtttcagacgcagcgctgtcgagtcacctgatctgggcccccgaacccacgtcccagggttccaggtgtcccaatgttcaggacggcttcagccaggggcctgacctctgcttggcggcacttggagcttagggcagcctgcacagccctccccggacctcggaggactccaagattcaaaagagaatgtcggcctgggactcctccccatcccaaatcatcccacacacagcagggtcagagagcacctctgaaggtacattctgtagcctgcatacaatgaacaataatgtcatcaataacagcaacgtgggcttccccagcacctcccgtggctctggagtagtcaggattcaggcacacactgagaggaaggtattagcacctccattttactaaagatgaggaagccgagggtcagagagggaaaaggattcaaggtcacccaacaagcgcatggtagaggcaaggtttgaaccaggtcttgctcaggagcttaacttttcctctgttttgcatatttcctggatggttccacccagcgtggccacacatccaagttcacattgtccgaaaatcccacagtgtcagagcaggaggtgccaatgggtttccaagtatattagttagcagtggaatcactcttcaagtgaagctccaatagagaaaccagataaaagtagaattaatctcctttatttaattcttttttttgagatagggtctcactctgttgcccaggctggagtgcagtggtgcaatctcggctcactgcagcctccacctcccaggctcaagtgatcctcccacctcagcctcccaagtagctgggactgcaggcatgggccatcacgcccagctaatttttgtattttttttgtagaggtgggatttcaccatattgtccatagctagtctcgaactcctgggctcgagcgatctacccacttcagcctcccaaagtgctgggattacaggcatgagccaccgtgcccctggcagaggtaatccacttttgaattacctcaggggaggtgggcagttagtgtccctttcctcaaaatgacatagcattccatcgcccgaccacagcgcctggctcaagtatgggtgtgtgacctaggtcaggtcagtgacatgacatcatgggaactgggctggaaccactgagacagggaagctctgtctccatagagtgttgatctgggccactgatgaccaccttgctgccacaaggactaaaactggaacagagggaggcagaggtataaagaaagtaggaccaccccagcaccccagaccttccagatcagttccctcacttcacagaagaaataggaagagatttaaggcgtagagcttggatgcctgttttgactcatcctcccaactcttgcccctggcactgtctgctggggttgtttcttgggctggacctgatgatgcctgaattttttttttttttgagatggagtctcacactgtcacccaagctggagtggagtggcgcgatctcggctcactgcaagctccgcctgccgggttcacaccattctcctgcctcagcctcctgagtagctgggactacaggtgcccgccaccacgccaggctaattttttgtatttttagtagagacggggtttcaccatgttagcccggatggtgtcgatctcctgacctcatgatccgcccgccttggcctctcaaagtgctgggattacaggcgtgagccaccacgcctggccacgccccccccccttttttttttttaagatgaagtctacctctgttgcccaggctggagtgcagtggtgtgatcttggcttactgcaacctgtgcctcctgggttcaagtgattcccctgcctcagcctcccgagtacctgggactacaggtgcgcaccaccacgcctggctaattttttctattttagtagagagagggtttcaccatgttggccaggctggtcttgatctctgactttgtgatccgcctgcctcagcctcccaaagtgctgggattacaagtgtgagccactgcacccagccacatgaatcatttttagtgccgtaattgggtttggggtcacccctcaccccagataaaagctcatctttctgagaaggtcctgaagatgtgacttgagtggttaggcagcctggcagggtgcacgtctgaggccgagataccctctcaatccatgccatgctccagccatggccagccatgctccagctgtggcccctggatctaggacttcccactgagtcagtttactttcctttttaatgaatcaggattctttcacttgtaaattgtagaaatcgactcaaactagcttcaaagaaaaagggaatttatagactcactgaactgaaaaaactctaggagctcttcatgtttcaggcacagctagattcaggagctcaaacaacgccactgaggctggagtgcagtggcgatcacagctcactgcagcctcgacttcccaggcctgagtgatcctcctccatcagcttcccatgtagctggggccatagttgaggtccaccatcgagagccaccacgtctggctaacttttacatctttttttttgcagagatggggtcttgctatattgtccaggctggtctcaaactcctgggctcaagggatcctcccatcttggcctcccaaagtgctggggctacaggcatgagccactgtgcccagccttgagtcatcattcctttacctaacctctactgacaatctttcaagtattttgaacattttgatattacaagcattgtggcaaagaacattcttgaatctatatctgtgcatacttgtgcaaagatagtggttggatactttattattttttattttttgagacagaatcttgctctgtcacccaggatagagtgcagtggctcaatcacagctcactgtagcctctacccgctaggctcaggtgatccttccacctcagccccctgagtaactgggactacaggcacgtgccaccacgcccagctaattttttgtattttattttttgagacagagtctcactcttgtcgcccaggctggagtgcaatggtacaacctcagctcactgcaacctccgcctcccaggttcaagcaattctcctgcctcagcccccggagtagctgggattacaggcgcctgccaccatacccggctaatttttatatttttagtagagatggggtttcaccatgttggccaggctggtctcaaactcctgacctcaggtgatctgcccgctttggcctcccaaaatgctgggattacaggcatgagccaccgcgcccggccaattctttgtattttttatagaagcaggttttcaccatgttgcccaggctggtctgaaactcctggctcaagtgatgcatttgcctcccgaagtgttgagattatagatttgagccagcgcgcctggcccatggttggatatattcttcaaagtgaaattgcagggtaaaaacatttgcatattgaaaaagatattgccaacctgacctccaaagaagttgtaccgttttatattatctccagtgatgtgtgagatgccagtttcttcacaattttgctcatgctgcgattaacaaactttaaaatcttggccaatctcactgatgaaaaatggtctcttggaccatcctggctaacacggtgaaaccccgtctctaccaaaaatacaaaaaattagccaggcgtggtggcgggagcctgtagtcccagctactggggaggctgaggcaggagaatggtgtgaacctgggaggcggagcttgcagtgagttgagatcgcgccactgcactccaacctgggggacagagcgagactctgtctcaaaaaaaaaaaaaaaaaaaaagaaaagaaaaaagaaaaatggtctcgttaactttcacttttttttgagacggagtcttgctctgtcgcccagggtggagtgtagtggcgcaatctcagctcactgcagcctctgcctcctgggttcaaacaattctcctgcctcagcctcctgagtagctgagattacaggtgtgtgccaccacacccggctaatttttgtatttttagtagaggcagggtttcaccatgttggccaggctggtcttgaactcctgacctcaggtgatccatcgaccttggcctcccagagtgctgggattacaggcgtgagccaccgcgcctggccaactttcacttttttttttacttacggtaaactttaattttccctaatgtcctttccctgttctagggccccattcaagataccgcattacgtttagttcctgtgcttcgttgagctcctcttagctgtgaaagcttctcagacgttccttgttttagatgaccttgacagtttttgaggagtactgctcatattttgtagattgccactcactcagttgggatttctctgatgtttttctcatgattaaactggtattatgagttttggggaggaggatcacagggatgggtgccattttcttttcttttctttctttttctttttttttgagacacagtttcactcttgttgtccaggctggagtgcaatggtgtgatctctgcacactgcaacctccgcctccggggttcaagcgattcttctgcctcagcctcccgagtagctgggattacaggcgtgtgccaccatgcctaattaatttttgtatgtttagtagggttgaggtttcaccttgttggccaggctggtcttgaactcctgaccttaaatgatccacccatctcggcctcccaaagtgctgggattacaggagtgagccactgagcctggccggtggggtgccattttctctttttggtcttttttcttttttttttttttttgagacggagtttcactcttgttgcccaggctggagtgcaatggtgtgatctcagctcaccgcaacctccgtcccccgggttcaagcgattctcttgcctcagcctcccaaacagctgggattacaggcatgtgccaccactcccagctaattttgtatttttagtagagacggggtttctccacgttggccaggctggtttcagactcccaggctcaggtgatctgcccgcctcggcctcccaacgtgctgggattacaggtgtgaggcaccgcacccggccaggggggtgccattctcatcatatcgtcaagggtatatacagttgtccctttgtatccttgggggattggtttcagcacccttggggataccagaattcaaggatgctctagtcccttgagtaaaatggtgaagtacaggtcgcagaatttgtttgagaaaagaaatacaataaaataaataaattggtgctgggtgtgggaatgtgcaccagctgtgtacgaaggttccggtttttccacatccccatcaacacttgttattatctctgtctttgcttatagccatcctagtgagtgtgaaatggtgtctcattgtggttttcatttgcatttccctgatggctgatgacgtcgggcatcttttcatgtagttattgtccgtttatatatctttttttttttttttttttttttttttgagacggagtcttgctctgttgcccatgctggagcacagtggtgcaatcttggcttactgcaagctccgcctcccaggttcacgccattctctatctcagcctcccgagtagctgggactacaggcgcccgccaccacgcccagctaattttttgtgtttttagtagagacggggtttcaccgtgttagccaggatgatctcgatctcctgacctcgtgatccacctgcctcggcctcccaaagtgctgggattacaggcgtgagccactgcgcctggccgtccatttatatatcctttttagagaaaggactattcagatcctttgcccatgtttaaattgtgttagttgtctttgtattattgagttgtaaaagtttcttttttctttcttttttttttttttttttgagacagagtcttactctgtcgccgaggctggagtgcagtggcacgatctcggctcactgcaacctccacctcccaggttcaagtgattctcctgcctcagcctcctgaatagctgggattagaggtgcccacaaccacacctggctaatttttgttttttttttggtagagatgggatttcaccatgctggccaagctggtctcgaactccttacctcagatgatccacttgccttggcctcccaaagtgctatgctggaattacgtgagccactgcacccagcctgggttaggatttcaacatagaaattttgtggggacacaaaaattcgggccctagcactgggtctcgtcacttcaagtgatcctcctgcctcagcctccttggtagctggggctataggtgcacgccaccatacctggctaattatttatcttttgtagagataaggttttgccacgttgcccacgctggtctcgaactcccggactcaagcaatcctcctacctcagcctctgaaagtactgggactacaggtgtgagccaccacacccagctttcttgccgaagtttgagtggctgatagtgattgaaaaggttggccctctgtagcagttactctccttcagtgtagtgttcagcgggatttcagatacacggcaaggtgatagggaagatagttggagatggcagtttacttttccttatattcaatgcaatccaattcagcaaacatattttctacgttaacaagttggactcgttagtggggatcatctgtgtcagagcattccgaggatgtagttagttgatcactgttcttgctgtgatttttacagcaggctggcttcgaagaccagagggctgtgtaaggatgttgtggggatttcagagatggatcagatacagcctttgtacttcagcagtgagacagacaggcacataaataactaacatccaggcaggcagagaaatgctgtgatcaaggttaaggaaggccgggtgcggcagctcatgcctggaatcccagcgctttgggaggccgaggcaggtggatcacctgaagtcaggagttcaagaccaggctggcaatcatggtgcaaccctgtctctactaaaaatgcacaaattagctgggcgtggtggcgggtgcctgtaatcccagctactagggaggctgaggcaggagaatctcttgaacttgggaggtggaggttgcaatgagccgagattgtaccactgcactccagcctgggtgacacagagagactctgtctcaaaacaaaaaaagaataaagaataaaagaaaatccctcattcacagcctctgggagatgggggtggagagcgggaggaggggaggggaggctgggtggggccaggaggtgaaggctgtgcaggtggccggggctgtattccaccagtggaaagggtgagtgatggggttggagtgggagatggctcctgagtgagcctgctcttctttcagcctggggacctgtgtgtgcccggtgggatcaaggacagcatgatgtgatgtgtggtctgtcagcccgggagagaccctgtgcctctgctgggtctcacgtcctcatctataaaataaagctgctggaccagatgagtgacttcttgggatttttctggccctagcaacctacgatgatgtcataatcagaagatatcttaaattaaaaaaaaaaggtatttaccttttaaaaaatataaaataggctgtgcgcagtggctcacgcctgtaatcccagcattttgggaggctgaggcgggtggatcatttgaggtcaggagtttgagaccagcctggccaacatggtgtaaccctgtctgtactaaaaatacaaaaattagccgggcatggtggcgggcgcctgtaatcccagctactcgggaggctgaggcaggcgaattgcatgaacctgggaggtggaggttgcagtgagcctagattgcgccattgcctgggcgacgcagcaagactctgtctcaaaaaataaaaatagaaggccaggcgcggtggctcacgcctgtaatcctagcactttgggaagccgaggcgggtggatcatgaggtcaggggtttgagaccagcctgaccaacatggtgaaaccccgtctctactaaaagcacaaaaattagctgggtgtggtggcaggcacctataatcccagctactcaggaggctgaggcaggagaattgcttgaacctgggaggtggaggttgcagtgagctgagatcatgccactgcactccagcctgggtgacagaacgagactccgtctcaaaaataaataaataaaaaaataaaaataaaaacagagtgagattccatctcaaaaataaaaatacaatatagtcacatggttctcattcaaaagggtctaaagcagtgacagggctccccaggcactaatctccctcctcggaggcaaccaggtttaccagttcatcagtgttatcagtttctcccacagagatggcaagagtctgtcacccagggctgaattctgaggaacccaacgatggggaaagtcagggacactcatgctcagaataggatgggattaatcagggtgggcttcctggaggagcctaattactcatgctcagaataggatgggctcctggaggagcctacttttgagccaggttttacaggaggggagtcactttggggcaggaagcaggtcacagaggagggacatgtcccaaatggaagtcataatctttcctctcaaagctgtcctcatccagtacagatggctccgcagccagccacctgcacaaaccaggaacgggggaatgatgttgctgcctgtcttctcacctgtgtccagcccagcaccaggtcctgccaacaccacttccttagcacattctcaagtcgccccatcttacctgagccgggagtggtagctaacacctgtaatcccagctactcaggaagctgaggcaggaggatcgcttgagcccaggagaccagcctgggcaacatattgagaccctgtttctaaaaaacagagagggcgcggtggctcacgcctgtaatcccagcactttgagaggctgaggcaggcggatcatttgaggtcaggagatcgagaccatcctggctaacatggtgaaaccccgtctctactaaaataatacaaaaaattagccgggcatggtggtgggcgcctgtagtcccagctacttgggaggctgaggcaggaggatggtgtgaacccagaaggcagagcttgcagtgagctgagatcgcgccactgcaccccagactgggcgacagagggagactctgtctcaaaaaaaaaaaagagtttgagcaagagcagcctggccaatatggtgaaaccccctctctactaaaaatacaaaaaaatgagccaggcatggtgctgcgcccctgtaatcccagctactcgggaggctgaggctcgagaattgcttgaacccgggaggtggaggttgcagtgagccaagattgcaccactgcactccagcctgggtgacagagtgagaacctgtctccaaacaaacaaacaaacaaagcgtctaacctggccgtcctattattttccacccagcagccaggatgatcttctcaacacacccactgcattatgtggaggagagtggaaagaggccggcgaggacagatgctgtggttgggcggccatgggggcggtggcagccttgtgctctgcagcaacccaacctcttttagatccgggacactgtgcgtcctctgcaccctggggcccattctaccacggcgcctttctcccagtgagtccttgttatgaactgaatgtttgtgtccccggaaattcataggttgaaatcctagccccgcactgtgatgggtttaggagacggggcctttgggagggagagaggtcttgaaagtggagcccacatccagacgcactggctcacgcctgtaatctcagcactttgggaggccaggtgggcgaatcaccaggtcaggagttcgagaccagcttggccaacatggcagaagcccatctctactaaaaatacaaaaaattgtcccagctacttgggaggctgaggcaggagaattgcttgaacccaggaggtggaggttgctgtgagccgagatcacgccattgcactccagctcaggtgacagagaaagactccgtctaaaaaaaaaaaagtggagccctcatgaatgggattagtgtctgtatacgaagatgcatgagagagatgctctgtgtccctgccatgtgaggatgcaatgggcgtctgcatgccaggaagagggccctcaccaggcactggcgcctcaaccttaggacatcccagcctccagaactgagagatacatttctgtcatttaagccatgcagtctatgctatttgattgtagcagccccaactgtctaacagggtcctccttatcttgtcctttagagctcagctcaaactgcctctccccggggaggacttatgggaagtcccctcccccagcaaatcccctgtgccccactgggcaacatcagggcagctgcacagttttttttttttcatagcactttatccagtttgtaatgatacaggctgacaggcaggcacccctccagtcttctccctcgttaaagatttggaattggtggccaggcgtggtggctcacgtctgtaatcccagcactttgggaggccgaggtgggtggatcacgaggtcaggagttcgagaccagcctggccaaggtggtgaaaccccgtttccactaaaaacacaaaaattaaccgggtgtggtgacagatgcctgtaatcccagctgcttgggaggctgaggcaggagaatcacttgaacccgggcggcagaggttgcagtgagttgagatcatgccactgcactccagcctgggcaacagagtgagactctgttaaaaaaaaaaaaaaaaaaaaaaaaaaaaggttggaataggtaatctctctcctgtgtgagaagatacgttgtgaaaaggtcactttcccatgccctcatccaccctcttctctcttcccccaacccaggaggtgacttttattagcttttgtgtctccagagtttctacaggtaaagataagcgagtatgaattcccactttattccctgccccctttttaatgtcaatcacgcatgaggccctgcacttgattttttcctctgaacaatgtgccttggagatcttggcaggatagcacatgggaacaccctcatttacaacatcttttatggccacacatggctttactatatggatgtaccataatttattatagctttttttttttttttgagatggactcactctctctcccaggctggagtgcggtggcacgatcttggctcactgcaagctccgcctcccaggttcacgctattctcctgcctcagcctcccgagtagctgggattacaggtacctgccaccacgcccagctaatttcttttgtatttttagcaaacgaggtttcaccgtattagccaggatggtttcaatctcctgacctcgtgatccatctgcctcggcctcccaaagtgctgggattacaggcgtgagccaccgtacgtggccaatttattatagctttttatttctttattataatttatttagctccctactgaagggtgcatgggtcgccctcagtcttttgctattatagacaatcccacagcaagcattgtccacttgctggaatccctaggtaaattccccaaagaggggattattgggataaaagggaaatgcatttggaattcagacagatgttgtcaggttgtccttcagagcggttgtaccaagtgacattcccactgataatgtatcagagtgcctgtttgtaattatacatgtatttatgtgattattgtatggtttctctccccacaggagggcagggactatgtcagttttctttatcatcataggccctcaataaatgttgaattaggctgggcgtggtggctcacgcctgcaatcccagaactttgggaggccaaggtgggcggatcacctgaggtcagcagttccagaccagcctggccaacatggtgaaaccccatctctactaaaaatacaaaaattagctgggcatggtggtgggtgcctgtaattccagctactcaggagactgagggaggagaatcacatgaacctgggatgcagaggttgcagtgagctgagatgaagccattgcactctaggctgggcaacaagagcgaaactctgtctcaaaaaaaaaaaaaaaaaagagttgaattaatgaatagattcatggttcttccaggaggggttggccaaggtaggagggagatcaccttcattttatgttcactgtgcccggcccagcttccctgatccttccatagaacagctgggagcctgggagagaccctggaggttctagaagacctaatcttgactgctgactcctgacccctgctccagagtagcccttctcctgctgtgaaatcaagaagtccatggctaggctcagtggtgcactcctgtaaacccagcactttgggaggcccaggcaggaagatcgcttgaggccaggagttcaagaccagcctgggcaacatagcaagatcctgtctctacaaaaaatttaataagaaaattagctgggtggggtggcttgtgcctgcagtcctagctactcaagataccgaggcgagaggattgcttgagtccacaggttggaggcttcagtgaactataattgcgccactgcactctagcctggatgagaaagtgaaaccatttctctaaaaaaaaaaaaaaaaaaaaaaaaaaaaaaaaaaaaaaaaggtctgggtgcggtggctcacgcctgtaatcccagcactttgggaggccgaggcgggcggatcacgaggtcaggagatcgagaccatcctggctaacacggtgaaaccccgtctgtactaaaaatacaaaaaattagccgggcgtggcggtgggcgcctgtagtcccagctactcgggaggctgaggcgggagaatggcgtgaacctggaaggcggagcttgcagtgagccgagatcgcgccactgcactccagcctgggtgacagagcgagactccatctcaaaaaaataaaataaaatgaaataacataaataaaataaaataaaataaaataaaaaagaaaaaataagtccaatgtcttagccctgtaaaggggcttaaaggatggacacttgcctgatgcctgaattgcctgtgtgtcctctgcttacatacctccagtgacggggaacttactccttccaagtgacttctttcagcttcagacaactaacttctagaaagcttttccatctactgccaggtgcagtggttcacacctgtaatcccaggactttgggaggccaaggcgggtggatcacttgaggtcaggaatttgagaccagcctggccaacatggtaaaaccccgtctcaactaaaaatacaaaaattagcgaggcgtggtggtgggcacctgtaatcccagctacctgggaggctgaggcaggagaatcgcttgaacttgggaggtggaggttgcagtgagccaaaatcgcaccactgcactccagcctgggcaacagagagagactcggtctcaaaacaaaaaaaaaaaaaaaaagaagaagaaaggaaagcttttccatttattgcgttgaaatctgatccttctagctgcctcctcttcagggaatcttaatgatggccctctggaaacagggctttctggcagatgagcaggagggatatttgtaaacaggtacccctcagcaattctccggcaagcagggctgactctcccaaggagctctgcagagctcagccacctcctcactctctcctgtcctgcccacaggtacgtgcaggaagggcggttccgaatcgaggagaggacgctgacagccttccagtggctctacagcccgcagcagcatcgcatcctcagccgggctgacctcgagtctccctccaggtaaaggggccttctgccttgaccctcacattctttggcctcggcccaggcctctcagctggtacttaggaagtgagctccgcactggtccacaaatccaccatggggaactttgccctcagtgatggggaggccttctaggaaagaatttatcagcctggatgcttgtcccacctcgaatgcactgaggcaactcactgcctctgctttctcctctataaaacggataggatcatactttccctgacttctcttgggagattataagtctccagtgaaatatgactgcagagatttacaaagcctggagattggtcgggctcagtggctcatgcctgtaatcccagcactttgggaggctgaggtgggtggatcacttgaggtcaggagttcaagagcagcctggccaacatggtgaaaactcgtctctactaaaaatacaaaaattagctgagcgtggtggcacatgcctgtaatcccagctactcgggattgagtagctgagacaggagaatctcttgaaccccggaggcagaggttgcagtgagccgcagttgaaccactgcactccagcctgggcaacagagggagactctgtttcaaaaaacaaacaaacaaacaaacaacaaacaacataaaacaaacaaaaaacccaacaaaacaaaacaaaagaccaaagactggagatccctggttccttcctctctggagggagagtggcaggtaaatttgctgggcacactttgctttgacctggagccagccgtgccttctttgtccgcctcctttcccatgccagagagtccagctgggatcctgagtctgggtagggggctgggaggtgagggctttttctgacccagatccttgctccaaacccctgcccactcttcccccagcactggacacgtatggccagcatcggcagtcacaacagaggcgtcctggcaacccttctgcagccacagcgcttcccaaggcctctgccacacccgacccggggactttctttccactttccccatcaaagccacttttttgttttttttttttgttttttttttttagatagagttttgctcttgtcgtccaggctggagtgtaatggcacgatcttggctcactgcaacctccgcctcctggaggcgattctcctgcctcagcctcccgcgtagctgggattacagatgcccgccaccatacctggctaatttttgtatttttagtagagtcaggttttcaccatgttggccaggctggtcttgaattcctgatctcaggtgatccacccgccttggcctcccaaagtgctgggattacaagcgtgagccactgtgcccggccacataacttcagatttcatacatgggaaggttacatgccagaggacttgaagaagagtctgccatatagtcattgagataagtgactgaattcatttttgtgatagaatattaatttttttttaagaaatagagtctcactgtgttgcccatgctggccttgaacccctgggctcaagtgatcctcctgactcagccacaatagttctcttttttttgagatggagtttcactcttgttacccagcctggagtgcaatggcatgatcttggctcactgcagcctccgcctccagggttcaagcgattctcctccctcagcctcttgagtagctgggattacaggcatgtggcaccacgcccagctaattttttatatttttagtagagacggggtttcaccatggtcaggctggtctcgaactcctgacctcagatgatccacccacctgtgcctaccaaagtactgggattacaggtgtgaacacaatagtttctaattattttatttaatgtattttgagacagggtctcactctgtcacacgggctggactgcaatgggatgatcatggcttactacagcctcaaacttttgggctcaaggaatcctgttcagcctcctgagtagctgggactataggcatgcaccaccttgcatggctaatttatttcattttattcttatttttatagagatggggtctccctattgtgcccaggctggtcaactcctaggttcaagccattctcctgcctctgcctcccaaggtgctgagatgacagacgtgagccactgtgcccagccaatagttatttttttagttcccgttatgtgtcatgcaaatgctttgcaggaataaattgatttaatcttcatagcaatgctatgatctaggtactattgttgtccttgtttttcagatgaggaaactgaggcacagaggttaagttacagctagtaagtggcagtgctcccaactactatgcacactgcctctcagagaataaggtttatacttgaagtgggggaaaaggggcgtaatttctttttctttttctttctttcttttttttttttttttttttgagacggagttttgctcttgttgcccaggctggagtgcaatggcacaatctcagctcactgcaacctccgtttcctgggttcaaatgattctcctgcctcagcctccctagtagctgggattacaggcatgcgtcaccacacctggctaattttgtatttttagtagatacagggtttcactatgttggctaggctggtctcgaactcctcgaactcctcccagagtgctgggattacaggcgtgagccactgtgcccagcctctttacaaagagcaagaaggtggtgtccgcaaactatagatgggtggacttagcatcagtcctagtcaagttccagagtcagcagttattaaagaggaggtgtgtgggcacttagacaaggaagacgtggacgatccgcatcggtgagtaggttccctaagaactcaccctactaggggaagctttttgcttttctgattagttttctagactcaaaattagaccgggggtggagcaggagactgcttctgagtttcagcaagcaattgttctttcttcttgtggtcaggtccttgcagatgacacagagccacatgggcagggggatgggacagctaaggaggttggtgagtggactgccatcagctgagttctattcagtgtgtttaaaggtggtttgatgagggaaggtgtgaccagtgtgctggcgacattgctgatggcaggaacctgggtaccattccagcaagcaagatggcagaattgggacccaaagtgccctggaagctgaattccaggtccaagtccagtagatactattcattcattcattcgttcattttagcaaggatgctcacagtagacactatttatttatttatttatttatttatttatttatttatttattcttttttgagacagtttcactcttgtcgcccaggctggagtgcaatggtgccatctcagctcactgcaacctccgcctcccgggtttaagcaattctcctgcctcagcctcccgagtagctgggattacaggtgcccgccacgatgcccaactaagttttgtatttttagtagagaaggggtttcaccatgttggccaggctggtctcaaactcctgccctcaggtgatctgcctgcctcggcctcccaaagtgctgggattacaggcatgagccatcgtgcctggccaggtagtagacacaatttaacaggggtaaaggataaatgtattttggtttctaatcctgtttgcacctgggcagcagggtgaaggaatcagaattgtctgaagggttcccatggagtagaagcttgggtatggccccatgtgttaggtgtctaccaaagaaaacgcttacattttgaggctgcaagagctcagggcagagtccagagtgagggaagagaaggtcctgctgttctgaggccaaggctctatgaggaatgttcctttgcttgttcatttatttggtgggcatggattgaatgccgttcctctgccagacattgtgccaggtgtcccccttgaacagctgagcagttgtatttctgggtgatggaacgggctgctgataggactatgggactatgggctggtcacccctgctatcgtttttttttttttttttttgagatggagtctcgctctgtcacccaggctggagtgcagtagtgcgatctgcaatgtccgactcccggttcaagcgattcttctgtctcagcctcctgagtagctgggacgacaggcactcccccaccatgcctggctaatttttgtatttttagtagagataggggtcaccatgttggcaggctggtctcgaattcctgacctcaggtgatccacccaccttggcctcccaaagtgctgggattataggtgtgagctaccatgcccagccagccaccacgcccagccagccaccatacctggcctccctgctatccttttttttttttttttttccccaagatggagttttggtctgttgcccaggctggagtgcagtgatgcgatctcagctcactgcaacctccgcctcccagattcaagcaattctcctgcttcagcctcctgagtagctgggattacaggcatgcgccaatatgccctgctaaattttttttttttttgtatttttagtagagacagtggtttcaccatgttgaccaggttggccttgaactcctgaccttaaatgatccacccgcctcagcctcccaaagcgctaggattacaggtgtgaggcaccgcgcccggccagccaccctgcccagcctccctgctatcctttctttctcccacaactatccattgtgatcctgctctgggtcaggccctcaaggaagaccagggtactgcctccatgggccacacattctagtgggagagacagacgataaacatgtaaacgcagagacaagagaatttcccaatatgaccagcgtgctgaagaaactcacacagggcatcgagatcatgagcagccagtgggtgtgtggggactctggaagaggtggaagtcctctccaagaaagtgacatgtgagctgagtcctgaagggcacaggggcgaccacataaagaagctgctggtgagaggtgttaagtgggtggtggggagggggcacggggcatggggtggaagagtccttctgcagggggagcagcaagtgcaaggctgttctagaagcagaaggccattgtagctagagcagagtcatgatccacagggtcaggaggccatgacccacagacagaagcgaaaacttctgtgcaattaaaggaacggctttctagcacttagagctgcctgaggatggagtgggctgccccgagggagagaacttcccatcactaagccatagtcaaaggccgctgtccacggaggttactgaggatgagactcaagcatcccaaaggttggctagaggacccttcgttccttctacgccttcacgttcaggagcatccttggtttggcggaagctggggggatgtctatggagtgcatgaatgaaagttccaggccgagcgcggtggctcatgcctgtcatctcagcactttgggaggccgaggcgggtggatcacctaaggccaggagtttgagaccagcctggccaacatggcgaaaccccgtctctactaaaaatacaaaaagtagccgggtatggtggcgggtgcctgtaatcccagctactcggcaggctgaggcacaagaatcgcttgaacccgggaggcggaggttgcagtgagccgagatcgcgccactgcactccagcctgggggacagagcaagactctgtctcataaaagtccagcctccagatcccaggcagcggggagtttcaggggtctgagcagccctggagactcgcagcatagcgttctgtaccccgtcccgggtcccgcgcaacgcagagctagagggagccccagagtatcttcctcagtagatcaggagcccccaggcctcaccgcacctcggttccccattgcccccattgcccccattgcatcttccaggaacccctggcgggcaggctgctccttctctccccgggtcctctgggtgcacctgccccgccccgcgcctttgttccggaggagccgccttgggcagcccccagggagctcaggacccgctgtaccccctgccaccgcctcccggtgcccgcccctccgccccctctccgcggctgcgccaggcgatccgcaggcagcggcacagggaccagggcgcgccccgggtggcggaggcgcggcgagggcgggagcacgaggaccccggaccctggatcggcgcgggctccggctgcgcgtgcgcggcggcggcggcgaggggcgccaggtgtgcgggcggtggcggctgcggagggcgcggctttgtgcgctggggccggccggggtgcgcgcgtgcgcggcaggactgctgcgagggaccccgccgccccggaggaggaggaggaggaggaggaggaggaggagggggctgggccgagggagggggcgaccgcggggactgaggtgcccttcgctccgggtccagaggcagccgcgcgccaggcggcgcagaaggtcagtggccccggggctgggattccgcagccagcctggatcgggacgtgagtcctggtgtgactgacggggaatcggagcgtgtgtggagtgtgaacgcgtgtgtttgcagacagacatcggcacgtatggacggcgcgagccggtactgcgttccggaggagccatccggcgtcacaggctgtgctggggaggtggggtgaccgtcctcagaaacccccgcgggcggggcgctgcacacacgtccacctatagggtgtgtgtgcgtgcgtgaggtgtgcagcccctgtcaggatctggcgagagaagctgaccgggatggaggtcagaggtagggtgtttacaggtggtggtagaaggaaaacagccaggaaccccaggaggaccctggagctaggctgggcttcctgaaaccccccatcccatcctcgctccagcctgtgcctattgcaggaagaggagctagggaggtgggctgccggctgagaggccttgagggatctttgggagcggggcccgatttcagcctgatcctcatttccagaggcctggatgggtgtgggggtgccggccctgagtggggggtccagggcaggcgtgtgttcaggagacctcaggggtccgtgtagactgtcctctggctttgccagcaccaggtgctgtgtgtctggacctgggagctggctgagggatacccttgcttcctctcatttgttttctatagctccccctacatgcttgttaacaaacctgaagggcacttgtatgccagtggggtttgctgggatgtgccctgttgaggggctgtcatcagagaagcctccatggggaatgagagagttgtcctgagccaggtgccagggctcttgggttctttgcctgcgttgtgaccctggggccatccctcaagccctatacgcctcagtttcccatggcgctttgccctcccccttcttcctgttgcagggtggggagtaaacagcttgcacagctgccaggaggctgggaggctgggaggcggggaggctgggaggctgggaggcggggaggctgggaggctgggaggcggggaggctgggaggctgggaggcggggagtgactcagggtctgtgaggtcttgggcagcgatttttcaggcgaaagtcccagcacatcttctcgacttgggcaggagttgggggaggctctgccctcagctccaagctgtggtgctgggttttctgagtcctggggtggggtggggtgggcatctgttggatttggctgctcaggcttcaagaagctgcctctggtccctccttcttcccagatatcaagtagttggagagggatggggctggggggcctggtagctgggtgggatgcgggggcgggagctgaagtgctacagcagcctctcttggttcctgtgtttgatgttactgggcagagacagatgctaagcttgggtagggtcggggctggtctaagtgggactgctcagctcagcatgttgaggcaatttggtgggaggtggcctcagctccagagaagaggaccctgctgctggaggcacgcttgcagctctcctcaccctctttcccatgaccctgtctgatcaactctggctgagccaccatggctcagaatgacttgagccttgagggaaagggaccctggcatggatgggggtggtggcagggtcacatagtggctaagcatgaaggccctgctgtcactcagacctgggcgtaagtcccagctccatcacctactgctgtggccgcacctgcattcccctcaatgggagcccgagagaaaggcttgcaggctgtggcttatttgggaagcaatctcaggaaacaagggcgaggacatggggtttgaaggagagggaggggaagcaacaatttgattattcccaccactctcctgggcggtgttctgaggagccttacagacagaactgctctgttggggagagaaacagggaagcacttacccattagccccatcccctgccagacaagggtggctctgtggacattcgctcccgtgtggacttccagattgcacatgtgtggggctcaagtggttccctgtgggtactccacacggcagcttccaagaaggcccagcgtggcctgacatgaagcactgtcccattgcacctgtaagatgctgcttggagcctgtggggacctggtcattgcagaagtgtttggagtgagaggtggggccaagagggctggaagcagcacactgaggtgcctaacactgcgtgaccttggccaaattacctgacttctctgagcctcggtttccttagctgggtgttttaagtgttaataaggcatttattgaatttttgaacatggtgatggccccatagcaagggcttcacccggggtatttctgtgtggccaggaagaccacatgcccagggtggctcagatagtcattcactcaagtggaggtgggtccgcataagaggacctctaaagacccctcccggtcataggacctggggctcaggggccagactgctgacctggtcagttcctctagggctgtggcccagtttcccagacctcctgaatgcttccatttcacagcctatgaattggagtcagcgatgtcctgctcctgggctggccgctcagatatacctcttcctgggctctgcctcaggaggacacagaggccagcactgggcagaggagggcgaggggagaggacagctcagaagcaggtgcttgaaggaggagtggagggagggtggatgctggcatttctggcattgggagctggcatacggtcatgggcatgggtctgggccatagtcagtgggggaggacaaggcagggggctgggggggggcaggaaaggaaggtgagcgggttggcagaaggtggccaagaagcatggaagagacagggacagggagtgggttgggcagccttggcgtatggggattcacagcgtctggggtggtggtaaccaaatgggagggggatgaggtggcaggaaggaagggagggcattgggtgaggtctagctgggccttcctagggcgtaaactggggcagtgttcgtagttcgtggtacagcatccacaagcctcctcgttccttttttttgagatggagtttcgctcttgttgtccaggctggagtgcagtggcgcgatctcggctcaccgcaacctccgcctcctgggttcaagtgattctcctgtctcagcctcccgagttgctgggattacaggcgtgcgccaccacgtcctactaatttttgtattttcagtagggacagggtttctccatgttggtcaggctggtctcgaactcctgacctcaggtgatccgcccgccctggcctcccaaagtgctggggtgacaggcgggagccgccgcctctggcaaaagtctcttcatccttttttccacggtgtccacctgcccctcccaggccaccgccccgtttgacaggggaggagttgtttgcaaacagttcctgttatgagcggcgattggagaaggtccacaggtgcctttgccaaggcctgttgccatggtggcatggtgggccttgtctgcctaccctctcccatctctgagcaatgtgcaccccccccaggagaggtcacagagtggggaaggtgtccagctgcctctttgctcacacatggccagctcaggctggccttacaaaggtcactgcgttcatccctctgcctgcaggcagggtcacacccagcctatgctgggagacccagcagccgccgtcttcattacagccatttaaagtctactccgatctctgcaatttgtttttaataagtttaatgaaaaataaagcaatgatactagcctattcatctgctccccttttaaagcgggcatctcatggatgatactcttcttgtccacacctctctcagtgctttggtgcctgtccagtaggaagttctgcctcatgtctgatctcagcctgacatgctgtactgtttttgggtgtgttttgtgtttctgattttctatttgttgcaacccttcagggattccagatggttctaagggcattcctgtctacctgctcatgatctggagcagtcgcaggggcacccaaggcaggtgtgatgccaacgatacaaggctgtgccgagcccctggccccggccacgctctggttctggacttttgcagcttgctctcagggccagctggttcccactcctttccctagttcagatccaggattactggcctccttcttggaccatgctgggcctgctggctgcgctctgccaggtctgggtcagcaagcagatggcagcaggcatgggcacttgggggactctggcacagtcagggccctgccgattagatggctggtggagagcaagagcaggaggggagagacagggagtgacaggcagtcgggaacactgaggtgtgcctgtgcatgtggacacatctgtgcttggtgtgcacgtgtggccttggagggcttgttgctggattgctgtgtctggacatctctgggtggttatatgtggttcttctgagcacacccctgtgtgtgcaccgtgtgagcacgtctctgtgtgagcacgtctctgtgtgtgcacgtctctgtgtgtgcaggtctctgtgtgggcacgtctctgtgtgtgcaggtctctgtgtgagcacgtctctgtgtgagcacgtctctgtgtgtgcaggtctctgtgtgggcacgtctctgtgtgtgcaggtctctgtgtgtgcacgtctctgtgtgagcacgtctctgtgtgtgcacgtctctgtgtgagtacgtctctgtgtgtgcacgtctgtgtgtgcacgtttctgtgtgtgcacgtctgtgtgtgcacgtctctgtgtgtgcaggtctctgtgtgggcacgtctctgtgtgggcaggtctctgtgtgtgcacgtctctgtgtgtgcacgtctctgtgtgtgcaggtctctgtgtgggcacgtctctgtgtgggcaggtctctgtgtgtgcatgtctctgtgtgtgcactgttgtgtgctctgggttgttcatgggtactttctctggatatgtgtgccagccacctactgggtgtctccagggttctcaagagtgtgcccatctggatggcaggtgatactttttccctgcaggatttcctgcccccacggaggctcccttgagtcttctgccatgccccatcccgccctctctccaggcttccttatcctgtttctccctctgtctgaggaagttgcttctccccctctggctgtgtgggcgtccactgccttctgggcagggcctgaagagggacggcaagtccagcctccagccccatcctcccgagctctgagctgagggtgatgggctcaagctctgagttgaggagatgagtcagggatggctgcagggggtgggcagaagtggcctgtgtgtcagcatgctgtagggaagtgtgtgctcttgcccccctccacctgacccgccctcagtggcttgggcaccagtgcagctgtgatgaggctcccttaccttcatactcttccccagtagccttggttggcacagtttctgatggggagcagagtggtctctggggctccgggcatccaatgggggccttggccttagcataatttatctcaccataatcactggtactaatggagctcttcctgcaccaggccctggactacacactgtacatgtaatcagctcatttactcctcagaacaatcccatcccaggggatagtaggtcctattaggtgggttcgaaaacatccctggccaggcgcggtggcccatgcctgtaatcccagcactctgggaggccaaggtgagtggatcatctgaggtcaggagttcgtgaccagcctggccaacatggtgaaaccccgtctctactaaaaatacaaaaaattacccgggtgtggtggtgagcacctgtaatcccagctactttggaggctgaggcaggagaatctcttgaacctgggaggtggaggctgcagtgagcccagatcgtgcccctgcactccagcctgggtgacagagtaagactccgtctcaaaacaaacaaaccatccccattttatgaggaagttttcccattttatgaggaagtagaggctcagagagcctgggttacttccacaaggtcacacagctagtaagtgatggagccgggttctgaacccagacccgttcttctgctgttccctccgctcttcacaaagctgtgaagctgtgtccgtctcgtcttggcagtctccctctcagagaggccatcccagatcaccccctctacacaggactccctagccatctggtcccatttggatcggatcaccctattgtaaatacctgcataaaggtagccctcatttatcctctacttcctaaccccctcttccccacctagagcagggacctgtctgtcttgcttactaaaatattcttagaactggaagacagcttggaacacagtagggatgcaataaacatttgatgaatgaatgaattaatgaatgaagagaggactgactccagacctaagcttgaaatccctcctatatactgtctcttacacaacagggactgttgcagagtggcaggagcacaggctctggagccagcttgcttggttcaaattctggtcctgccagtgttctggttatctaatgctgcttaataaaccacccaaagcttatggcttaaaacactggtgacactgattttgcccatgaatctgcaacatgggcagggttcagtggggataacgcttctccactcagcattgtctggagtgtttcaaggtctaggggctgaagccatctgaaggcttagtcgctcacacgtctggcgtttcttgctggctgttggctttgggtcagttcctctgcacatgggcctctctatgtgctgtctccacatgctagattgggcttcctcccagcatggtggctgagctaagggacaagcatgcccagaaagagagccaggtggaagctatttcactttttattttatttgtttatttattgagatggagtcttgctctgttgcccagggtggaatgcagtggcgcaatctcggctcactgcaacctctacctcccgggtttaagtgattctcttgtctcagcctcccaagtagctgagactacaggtccatgccaccacgccaggctaattttttgtatttttagtagagacgagggtttcactgtgttagccaggatggtctcgaattcctgaccttgtgatctgtcctcctcggcctcccaaagtgctgggattacaggcgtgagccaccacgcctggcctatttttatttatttagagacagagtctcgctctgtcgcccaggctggagtacagtggcgtgatctcggctcactgcgacctccatctcccggactcaagcgattctcctgcctcagcctcccaaatagctgggactacaggtgcctgccatgacacctggctaatttttgtatttttagtagagacagggtcttgccatgttagccaggctggtcttgaactcctgacctcaagtgatccgcccgactcggcatcccaaagtgctgggattacaggcgtgagccaccgcgcccggccagcagtttattcttttagcagcagctacacttttgctcactgatcccctggccacaggtgaggcttgggtctgtccccagatccccgcctactctcatgtagtccaggaggcatcttactgtgcagagccctgctgagggtggggcccgtaatgagagaagggggaacttgaatgggaaaggccttttctgtcccagtttattatctcattacaggtcagccctgctcccttcaaggggcctgggacacatgttgctgatggagataccatgagggtggggctcaggcagaattgctctgggcttggggctgggatgaaccccaccagacccccatctttatccaggaaaaatcaagatggtgaggcctgaacatgctgtgtttgagctgagggagctctccgcttctccctgtccctgccgcctgcttccacctgagtcactgttcatctgcctgcggcatcatccccctgcggcatcatccccctgcctcgcttgctggcctcagggaggaatctcagggtttgctccttgtggcccaggttagggctgctcctgagcagagcgttggcagggggcccaggaagaatctgggggtttgcacgagcccagcctggcagtgtctcccatctaacgcagccctcatttagggcctgctctcctctgagccttccctgaaggaatggcagaagggctcaaagggggactctgggtttgaattctgtcaccttccagccctgttaaggaaggagaccactgctcctcctgctgccctcctgcccccaccttgcctagttcacaagataggaggagagaaaaagcaaaaagttggaaaaaaaaaaaaagtaagataaatagccagacaaccttggcaccaccacccggccctaggagttaaaaaaagtgataattataacatcaacccctgacctaaactacttttgttatctgtaaattccagacactgtatgaaaaaagcattgtgaaactttttgttctgttagctgatgcatgtagctcccagtcacatttcccacgcttgcttgatgtatcacgaccttttcacgtggacccctttaagttgtaagcctttaaaaaggccaagaatttctttttcgggaagctcggttcttaagacgcgagtctgccgatgctcccggccgaataaaaacctcttccttctttaatccggtgtctgaggagttttgtctgtggctcgtcctgctacactgtgaccttggacgagtctcttaacctctctgaggctccagttacttaccaggagggagactgtggtatggtaaagatgaaaggaagtaaaaagtatgacttttttttttttttttttttagacagagatttgctcttgttgcccaggctggagtgcagtggtcagatctcggctcaccgcaacctccacctcccgggttcaagcgattctcctgcctcagcctcctgcgtagctgggattacaggcatgtgccaccatgcctggctaattttgtatttttaggagagacggggtttcaccatgttggccaggctgatctcgaactcctgacctcaggtgatccgtccgcctcggcctcccacagtgctgggattacaggcgtgagccaccgcgcccagcctggagttattctttacagatgaaaaacctgaggcagagggagtttaagtggtttcctcacagctacatttaatgtcaggactggggctggaatccgtgtgttctgacaccaggtggtggttgcttatcttttgcaggaggaggatttccccctcccttcaaccccttccgccagagggcaacatggctgccatcctagaaacaagcccaggaagacgctccctttcctcctcgcaccacccaagcttgcctgcagagggcgcaaacgcccaccttctggccggtcctgggaggcgccaggtgccccgccttagcaggggagggcgggagtgacccagctgggtgggtgtgggcagagttggctgtgtgttctcctttagtgagaagctccttcagacagcccccacggtccaagcctttcttttctttttttttcttcaattttttttttttttaatgttttgcgatggagtctcactctgttgcccaggctggagtgcagtggcgtggtctcgggctcactgcaccctctgcctcccggattcaagcgactctcctgccccagtctcctgagtagctgggattacaggcaggtgccaccatgcccggctaatttttgtagtgtttagtagagacggggtttcaccatcttggcagggctggtctcaaactcctgacctcaagtgatccacccaccttggcttcccaaactgctgggattacaggcgtgagccatcgctcccagcctttttttttttttttttttttttgagatggagtctcgctctgtccccaggctggtgcgcaggggcgcgatctctgctcactgcaacctccgcttcccgggttcaagccattctcctgccccagcctcccaaatagctggggttataggcgcatgccaccatacctggctagttttgtagtttttagtagagacagggttttaccatgttggccaggctggtctcgaactcctgacctcaagtgatccaccccaccatggcctccaaagtgctgggattacaggtgtgagccaccatgcccagctttggtttttttttttttttctttttttttttcgagacagagtcttgctttttggccacactggagtgcagtggtctttactgcagccccaacctcctgggctcaagtgatccttccacatcagccttctaggtagctgggaatacaggtgcacagcaccatgcctggctaatttaaaaaaatttttgtacagatggggtcttactatgttgctgggactggtcacaaactcctgggctcaagcaatccccctgccttggcctcccaaagtgctaggatgacaggtgtgagtcaccacacgctgagcctgtttttttgttttgttttgttttttttgagatggagtcttgctctgtcgcccaggctggagtgcagtggcgccatctcagctcactgcaagctgcctctcccaggttcacgcaattctcctgcctcagcctcccgagtagctgggaatacaggcgcatgccgccacacctggctaagtttttgtattttcagtagagatggggtttcaccatgttggccaggatggtttcaatctcctgacctcgtgatctgcccgcctcggcctcccaaagtactgggattacaggcatgagccaccgcgcccagcctgtgcctgttttttaaaacttgaacttttagcatatcttcatatattaacatatattaagtgctacctcgttattttcagtggctagatagtattccattgtacgcttattctgcaatgtagttaatcctcagttgatgatcatttagattattttttgaatttgctattataatgatatgattaacatctgtatacatagatcttgtcaagtggtatgagttaacctgtgcaataaatttctaaaaacaaaattgttggcataaagggtatgtgcacttaaacaattttgatagagtgtattagtcagggctttgcagagaaatagaactaataggaaatatatacatatgtatataggggtgtgtgtgtatgtgtgtgtgtgtttagatttattatgagggattggttcatgcaattttgtggggtttttttgtttgtttgctttgagatagagactggctctgttgcccaggcaggagtgcagtggcacaatctcagctcactgcaacctctacctccctgattcaagcagttctcctgcctcagcctcctgagtagctgggattacaggtgcccgccaccatgcccagatttttttttgtatttttagtagagacgtgggtttcaccatgttgatcacactggtctcgaactcctgacctcaagtgatccacctgccttggcctcccaaagtgctgggattactgagccccagccaggcatgagccactgcaccccatcaggttaatgcaattttggaggccgagaagtcccatgatttgccgtctattagctggggatccaggaaagctggtggtatgttctagtccaagtcctaaggcacaagaacgaggagcgttgatagctgagggcaggagaaggcgggttctcagctcaggcagagaatgaactctcctttcctccacatttttcgtctattcaagctctcagtggattggttgatgccggcccacattggtaaagcggcatcttctttacttagtctaccaattcaaaggctaatctcttccagaaacaactcacagacatacccagaaataatatttcaacagctatggagatatcccctagcccagtcaaattgacacataaatttaaccagcacagagatattgcccaatagctacacattaatgggacgcccgtttccttatacctttacacaattatcaattttttctttttgagatggggtctgggctctgtcactcaggctggagtgcagtggcccaatcatggctctgcttcctgggctcaagtgatcctcccacctcagcctcccaagtagctgggactacaggtgcctgccatcatgccccactaatttttgtattttttgtagacatgggggttccaccatgttgcccacactggtctcgaactcctgagctcaggtgatccacccgccttgtcctcccaaagtgctgggattacaggtgtgagccaccgtggccggcattatcaaatttttaaaactttatctgatgggtaaaagtgataccttgttattatttaaaatttttaactgtagtaaacttcgtagcttctttagttcagagccatgtgtggctaaaactctcttggcagatggaccttactgaacagataagaataaactgcaataattttgggaaactgaggcgggcagatcacctgaggtcaggagttcaagaccagcctggccaacatggtgaaacgactcacagacagtctctactaaaaaaaaaaaaaaaaaaaaaaacattagccaggcatggtggcgtgtactggtagtcctagctactctggaggctgaggcaggagaattgcttgaacctgggaggcagagactgcagtgagccgagattgcaccagtgcactccagcttgggcgacagagtgagactccatctgaaaaaaaaaaaaaaaaaaaaagtaaataaataaattgtgcaattgtggtatatgtctgggccctgctcttggaactcagtttttacaagccctccctttgcaatctgccatcatcttgcttttcagcacttgtgcaatgggaaatttagtctggaccttgagatagtgcaggtgggcagtgatctgtggactgtaaatcactatgcagatgctaggtgctgtttttatcttgaccctgaggcgtgaattcttcactaatgtggggttgctggccctgaatgcccactgtgccctgtttccctggagaccagcatctttctccatcatccttttttttttttggtggttttgagatggagtctccctctgtcaccaggctggagtgcagcggcatgatctcagctcactgcaacctccacctcctgggttcaagcaattctcccgcctcagcctcccgagtagctgggattacaggcatgagccactacacccagctaattttgtatttttagtagagacggggtttctccatgttggtcaggctggtctcaaactcccgacctcaggtgatccacccgccttggcaggtgtaatcccaaagcgctgggattacaggcgtgagccaccgcacccgacctctctatcaccctttatcttcatatggtttatgaaggaagcagaggccagtctaagtctccccttggatgactagtaggctgaagtctcaaaagagtaggtcacctgcccccagtgacttagaggtggatctgggatgagagctgagctccagggggttagtactggggctggaatgggtactactgtctggatgggggaggatctgggtcagaccacctagtgcctgcttcactcgggacatctgtttcctgagcttcctgtaactgcctcatccccatgcctggggaaggagcttgtctcatctttcagctcccactggtggctatgaggtctgagctgctcgagcagaggaaaccacattgtcccttcctcccgtcctgccccgagggccaggggacacagtggaggggctgctgctgacaggagcctgaactgccccctcctctgagcccagccagctttcttggctctacctgcctcaaaagcccgtagaggccgggcgctgcgagcgccgtggctcacgcctgtaatcccagcactttgggaggctgaggtggacggatcttttgaggtcatgagttcgagaccatccaggccaacatggcaaaaccccatctccactaaaagtacaaaaattagccaggtgtggtggcaggtgcctgtaatcccagctactctggaggcagaggcaggagaatcacttgaacctgggaggcggaggttgcagtgagctgagatagtgccactgcactccagcctgggtgacagaacgagcccccttctctaaaaaagaaaaaaaaatgcccatcgaactgggtgagttccctggagctctgccctggggttgggactctggctgggactttgccccaggctggtccccgagaaacacctacagcccttgtgaactgtgacccacagcaggctctgggaagcgttttgagcctgagagagaaggagcccgtccagccaggcattgggggtagctgggtacttgctctttccatcttcattattctctccccagtgatgagctgagttttgctttaggaccttacttttcctgtctgtaacatgggcactgatgcactgtgcatttctgtggatccagaattagtggggctgataatcatcaagctgggttaatttggttggattccttcacttccctgagcctcagtgttcctatctgtaaaatgggataacagggcaccctctcagaggggttgtgaggctgaaaagctaagcgctttggtccgcgctggcccacaggagactcacagatgccggtgctgccctggctctcttgtgcccgcagctcatcctcctctccccgctggctgctgagagtcagctgagctctgggaggaagctgggctgtgcttgatggggccaggagggctgggcctgcttcacagaccgcttcccttttctctcttttttttttttttttttttgagatggagtctcactctgtcacccaggctggagtgcaatgtcacggtcttggctcactgaaacctccgcctcccaggctcaaacgattctcctgcctcagccttccgaggagctgtgattacaggtgcccgccaccatgcctggctaatttttgtgtttttagtagaggtggggtttcaccatgttggccaggctggtcttgaactcctgacctcaggtgatccgcttgcctcggcttcccaaagtgctgggattacaggcgtgagacagtgcgcctggccgcttcccttgtctcttgactcacaatccttcccagggagcccacagtctccttgctgtgcacggcacatggaagaggaatcacagggtcagagcagggggtcaagaagctgcgcgggactgaagcagggacagaatcgtccttgacagtaatgatagcagctcccgtgacggccttggagccccgtgctcagtgtttctgtttgctgataaactcgtgaaggtggtggcagcctccccaaattacagaagagaaaactgaggcctggagagattaggtaacttgcccaaggtcgctgggccccaaggaaggagaggaaggcagcgtgggaaaggccctaggaagactctcacaccctgcagggctcatgatgggccatgagccgtctgggagagtcccttccccctttccagccctcagtctggggacgtgtgggcccctggatcctcctggtttctccaaggttcctggatcccagcggcatcgaagaagtccaggctgtgggttctgcagggccggcagccgggccagtcctgctccttggccgggtgtctgactcaggagtgttgtttgtggctgtcaggggcacaccccccggtgggggaaaccagcctcagggtggcagcagcggaggcctcgaaacgcaccccttccctgtctccaggctgccgttcagatgtctgtgcctgggccggagtctgtcccggctctgggaacacttggtccaggtgttcatagctgggcatttacctggctgtctccatagaccgggaggccccagataaaagcatctgtcagctttgtcttcccctagaatgcatgcggcgggcagctttcacatgtggtcagtgtgggtggtgaggcgtgcccaagtgtgatgtgactatcaccccgcttctctctcatgtatgaaagcgcatcaacgtatactccaaagatgggcctgtcattaactccctctaactgattttttaaaaaagtaatttgcaacaggatttttttttttttttttgagatagagtttcgctcttgtcgcccaggctggagtgcagtggcgtgatcttggctcactgcaacctctgcctcccaggttcaagcgattctcctgtctcagcctcctgagtagctgggaatacaggcatgtgccacgacgcccggctaatttttgtacttttagtaaagacagggtttcaccatgttggccaggctggtctcgaactcctgacctcaggtgatctccctgcctcggtctcccaaagtgttgggattacaggcgtgaaccactgcacccggcctgcaacaggaattcttgcaacgtatgcaacacctccaaccccagcacctcccaactgaggctgtgggctgtacctggctcaccctggtgctttctgcacccagcatggtgcttggcctagagcaggtgttgctgtcagcggcgggaggccaggtgggctgactgttcccactttcacttgttcacttgtcaagctcttttctttagttgggactttattaatggagaatgaaagaaatccaactcatactggctttaggaataactctttattcgtacggctggctctcctatacccggggtcagctggttcctggcacagccggatcctggagctcagatgatgcccttgagactcaatcttttggccgggtgtggtggctcccgcctggaatcccagcactttgggaggctgagacgggtggatcaccggaggtcaggagttcgagactagcctggccaacatggtgaaaccctgtctctactaaaaacacaaaaattagctgggcgtggtggcgggcgcctgtaaacagatatgtgggaggctgaggcaggggaatcacttgaaccagggaggtggaggttgcagtgagccgtgccactgcactccagcctgggtgacagagcgagactcttcaaaaaaaaaaaaaaaaaagacatgatctttctcctctttccctttctctgtcagttctcttctctgccttcctgtgagtcggtttcattttccccacactctccacagccccaggctttcatctcatgcttcagcaggggaagcctcttgggatggtgtcttgttgggtttacttaggtctcctgaaccagtccccttggctggccaggcctggtcaggtgcccactcctgaccctggaggtggattgagtgcagagggttcttctcagatggaggcagggcaggcaggacccaagttgtccacggtacctgttgagcacttcctgggtgtgggtgggtgcctctggggagagaggcgcttgtggcactctgcagtggccatcctgtgggaagccagcagcctgaagccaccccagagcatgaaccacacaatcctaactttcctggggcagaggtgagggttgggggaagcctccgggctcctgctggggactagctgccttggaggtagagagtcagcccccagccctgctctggcccaggaccctgaagctgctcccccagcccactcagggcttgaggcccctgtgctgtcccctgctgtgaaggagtcaagaaaatagaaatccttgtacccttcgtccacaagctggggttggcccctggcacctcagcacggagtctaggaccttcacagtggcagcaggtgccagagaggaaatttcagggagggttggccagagagagaggccaatggcaccagctagggccgtttttttcctttttttttttttttttttttttgagatggagttttgctctttgttgcacaggctggagtacaacagcatgatcttggctcactgcaacctctgcctcccaggttcaaacgattctcctgcctcagcctccagagtagctgggattataggtacctgccatcatgcctggctcatttttgtatttttagtagagatggggtttcaccatgttggccaggctggtctcgaactcctgacctcaggtgatccacccgcgttggcctcccaaagtgctgggattacaggtgtgagccgccacacccggcctttcttcttcttctttttttttttttgagacgttttcttccctttctccactgcttgggggtagggtggggcctggggccctatctgtgcccactccccccagtgtctgttgtagtgtacgtgccacatccctttgaggggctgccattagtaagtgcctgctgtgtaccaggtgtggtcagcaccagtgcgtgcagagatgagcactggccctgtggtgtgcagactgggatgcgtgcaggacacgctagccctgtggcatgaggaccagcacctgagcatgcagagatgaggacgaaccctgcggttcagctgggaagacaaatccacccgcacatgggtaccgcccccccaccccacacagccagcgtgaagcatgccactgctctgacctctgtctagacacttggcggcgggggtggggggcggctgacaggtacagctctgtgcccatgtgtgtgtacatgcgaatgccccttgcagtgtgatgtggtctgagtatgtggatgagtgcctgcgggcacatgtgtatgcgttcatgtctgtgcacgtgtccaatggggctttgtcagtatgtgagaagcgtgtgcaggtgtgtctactgatgcctgtgtgaagtggtgtgtggatgtgcacgggagcgtgtgtgccgcgctgtgctcaggtgtgtacaggtgtctaatgatacgtatgtctgcgtgcatgtatctgtgtgtacctgggtatcctgggcgtgtgtgtgtccatgtgtgcatcccacgtgcccctgtgcccatgcgtgtgcatgtatacttacatccacgtgtgctagtggaatgacatgtgtgtggctggttcctctggcgtgtgccgagccatggtggggcaggcaggcaaaggtccctgtctcaggcagccctcgggagtgggtgtgaaggtccccagtgctcaggcgtccctgaggcttccagctgaatctttctgtccctcctaggcgtggctgtgggaatccttggggcgcctttgggttccaggaagctggggctgtgtgggccgggctgctaactggggctgtggagcaatctgccagccgagccccttccggagctgtgggttcctctgggtgtggggaagctgccctccacaacctcctcggcctatcttggtgcctcctggagtgcaggacacacctcccagctctgcagcctcacccacaggaagctcgggttgggggcaggcgaagagggaggtgccacgctgggctccccgccctgcaccggcactgaccccgctgtaccacggccctcttgcggacagccccggggacgtcgttgggacatcgctgggaccccgggctctgcagccacaaccatgtttggccggaagcgcagtgtctcctttgggggcttcggatggtgggtgacaggtgggagggtgggggaatgatgggagagaacttagaagtgaagtcttgttaagtgcattggcggccgtgggaacagaggggctcgggctgtgcctgagagctgggtctgctgacgccctggcaggtcgagatgcaggatcctggtggggacatcagagaccgtaagccttccccactgtccctgggcacaatctgctggcgaatcctggaggtctgcgccggctgcccgtggggaggtggatagcatgagtgtgactgcagttgaatgtgtgtgtctctgtgtccgcaggttcccatgtatgtgtgtgcgtgtctgggattatgtgtaagtgtgtgtgtgcgcgtttgagcctgtgtgtgcaggcgtgtgtgtgtggctgtgactgccagtccgtgtgaccgtgtgtgaggtgtgtgcctgtgcatgtgggcagctgcctgtctgcacttctggccttctgtgtctgtgtgtgcttgtgtctgcgtgtttgtgtgtgtgatgctcctgtctgtgctgttgttgtggccttgtggcaggggagtctgtacctgctggacctctgggctgcctgctgtcttgggggtgggttgtgagagaaggtctcccacctgcaccccaggcagcccaccctagctctgtcctagcctgagcagctgcatctgtccccagcctcctgcctggccctctggacactcttgcctctaagcttctgtctgggatgagggatgtgctttttcttcccggcggggggcagaaggtaggcacacgaaggccaaaggcttgtctctggttcccagtgctggcagcttcttcgcagctggggaacagagtctggtggttttcatgatcggtttcctttcagtgcctgggctgggggcgttgtcagactgggagagggccccgcgggaggtggccggggggtgtcccggtgtggaaaatggtggactaatgggggtggcacgaagggcgagggggagaggggctgtgttcctcggtaatttttcgcttccgtgtgtgtggcttatttccctcttcctcctcttcaaaagcactttgccatccatcctctggcagggggggactgtgggcactccatgtttggcagatgggatggtgcggatgagaagatggcacagcgtcgcctgtgtctgctctcgggccctccctgacgcctggatctgggagctgccaccccgagggtaggtgccagtgtccgggaggcagcagaggacttggcttctggttgggaggggtgtgtgtgtcttggctgtgggccttgcagggcagggcccagcaattagattgtgccctccaaggcccgcctttctctgggaggtgtggagcagatggaaggctggtcgccagaaagctccgggtgcacaggtcccggtctcagcctagcttcattccatatgaagccctctgtgttgagacccacagctccagagcacaaggcaaagccaggcctgagatttgaatctgggcaggtgagggggaagacaggagtgtggctgcccagggctgccaagatagaaagcagaattccaagttcttctctagcagcccttctcactggggcttccttaatgaaatgcacattcagattcaggaggtctagggtgagccgaaggtggaggaagagccctaggatgtcccagacgcccttgtgtgctggctcagtgtccactaggctgtgggttccaggagggcaggccctgccccgtcgcgttcacctggaagcctggcatgtcacacaggctcagtcgatgcttgtggactcatcgaggtcttttgcacacagcaggtgtctgcttggggccccttgaggttgacgggatggcggggccttctgggcttggaaggttaaggcagcaagaaagggggcgagactggggtttgggcctcctcatctgggatggctgtcagctgggagggggtgtcacggattcctggagccctggtccctccagacagtgaacagaatctctggggctggtgttttccaagctccattggatgcagggtggataacctctggcaccaggggcagacaaggtgatgagggtgggtgggatgggatgggagagggaggagtgcccaggagccttggcttcctgaaagggaaaggcccagcctcacagtcctctccatctcccatctcagcctctccaaaaccagagccctgccctcctgaggccacaccctgatgtgggaactctggtgggctggctgctgtgtaggcgtggtttgaaccagggctgctgtgaccacggtgcctgtaggtggtgcggtgggcggggctgacccgacagcggtcagaggtgcacgcaccaggagccccggttccagcggttccagcgccgactccaccttgaccattgaggaactctaatgggacacttcctctctctgggtctcagtttccccttgtgtcagtgggggatttctgccttacccacaacacagggctgttgtaagaattaggagattccttgagaaaatgtaaaacctaagcgcctgctgtgaggggctgccatccggcagctctgggttgcacgcgttacagcagagtgtggggctctgagtcctgctcggatctgggtgtctgtgcgttgaatgggggaagaggagggtctgcaccccagagcgggtggggattccagggtgagaccctcagggaccagtagtggaagccctaaggaagggactcaagaggacgtgtgaggaagaaactgggagagacgtgggccaggcccctcggggtgccgcttgctttgctgttgtaactgagatcagaaggtgctgggagtttactcagagtgaaaggaccccgtcccctagctccaggcctcagggtgacttgtgggctggctcagctccgtgtcctctcctcttccctggagctgtgactgtgggaagcctgaggcagcgctgggctggccagagaagggtgccggaaagagcctccagggtctccagcatgctggagccagtggcagttttagtgaagctgacagtgatggtgacactgatgatgacatgtggtgacatggacagtgatggtgacacgaatcgtgatgttgcaaaggcagcattggtgctggtggcagtgctggtgacagtggtggtcacgacccttccacaagaggagatactgacagtgggaacactgtccacctttctgcctctggagagggaggaggggcctcttcttgccagccataagggctggcatatgcaggggggtaaaaatagaacctcagcggcgctgtctccccttccagtgagggcgggcacaggctggggatggaggagctggctgtgagggcagtctgcagcaaacgtgatcttccccgctctgaacctctgtgcctgatacaacccaccagggtctgccccaggagcagggtctgcctccctggatggactggtggctccttgggcaggagggtccctggggctggggatgcttgcgtcttcccaaagcagacgcctgggaaatatggatgtccacctggcattcagattgacatccgtgctgacccctgaagccgggttgctgggttctcttgcgagggtagccgtaataaagggagaggctgcatacaaagtgcttacgatccctggacctgacgtgagatacctgaattcagactgggccagtgattttacctttctgagcctgggtttcctcatctctgaaatggggagaataataatacgcatgttgtagggtggtgtgtggccccagctctcccagcactcagaggcgtctctccccctgctagcggagaactggcccctttagccagtccctgacagagccctgctgtctggtggtttgggctgtcccggggactcctccatacagatgctatgtaggagtcttcagcctcagcactgaccggagcccttgcttttctcttggcaggatcgacaagaccatgctggcaagtctgaaggtcaagtaagtagcaatttcctgttctgtaaaggtcagagatgacgcggatcagagcgccgggcccttgctccccccaggttgtgggagacacaagaggggctgtcgtgtttgtcagattccagtccgagtccatggtgcttccagatcggaggaggctggactaactcttattcctggggtgttcagggagaggtagaggtgggaatggaatcaccaggggctagaatggtgggagtgtgtgtagcaggtgtaacattcagtcccattattcttttttttctttttctttttctttctttctttctttctttttttttttttgagacggagtcttgctctgttgccaggctggagtgcggtggcatgatctctgctcactgcaacctccaccttccaggttcaagtgaatctcctgcctcagcctcccaagtagctgggattacaggcgcccaccaccacacctggctaatttttgtatttttagtagagacggagtttcaccatgttggccaggctggtctcaatctcttgacgtcatggtccgcccacctaggcctcccaaagtgctgggattataggcgtgagccactgcgcctagcccagacccattatcttcctatcactttagtttttagatatatattgggctgggcatggtggctcacacctgtaatcccagcactttgggaggccgaggtgggtggatcacctgaggtcaggagttccagaccagcctggccaacatggtgaaaccccgtctctactaaaaatacaaaaattagctgagcgtgatggcacttgcctgtaatcccagatactcaggaggctgaagcaggagaatcacttgaacccaggaggtggaggttgcattgagccgagatcacaccattgcactccagcctgggggacagagtgagactctgtctcaaaaaaaaaaaaagaaagataattacattttttatcactttaatttttatgtgaactcccaatcctggcagtgactttctgacattccccgcctactaggacctgactaaacactccagggtatgtgtgtgtgtgtgtgtgtgtgtgtgtgtgtgtgtgtgtgtgtgtgtgtgtgatgtcagctgctcatcaagtcatttgttgccaggtatgtcagcatgggcagcctggccctggggctttctgaggctcccacgccagactcagggtgtgggaattacctgcctcggtttaccgtgtatctcttggtccgtctgctgaggtccgaagcaggcacagccctctcctagaacctctgacctctcttccctcaccaccttcattcctttttcctctgcgtttctggccaaaccattttgtctgcatcctgatctcctttttcttttgagacttaaccaaagtgtagcctgcgtccagctgcacccctcccatgaggcaatgagtactggctaaccatctgctccagtggagtgaattgaaaaggagggaaattctaggaggaaaaaagcattggcctctagctcaaaatattctcccggcacatgtgaattcactgttgcatggaaaattcctccaatgaatcgccctccttccgaggcagcttctctgggttgtcactcccccatctcggcagaaggttttccctgcctagtctccctctgtcatgccattcagttgccagccctggttgtgtatcccctggatgcaggtccctgggcaaagtacggccagtcttgacggttggcataaaagagggtcaaaataagaggtttcccactttggttggttttgttcaaaaaggtgaggctgggcagttcgcagggccgggatggaggacagacttttcctgcccttcaagagctttcagtttctctgttgagctgatgccaggaagctggatgtggtggttcacgcctgtaatcccagtactttgggaggccaaggtgggtggatcgcctgaggtcaggagttcgagaccagcctggtcaacatggtgaaaccctatctctgctaaaaataaaaaaaattagctgggcgcggtggcgggcacctgtaatcccagctactcggccgactgaggcaggagaattgcttgaacctgggaggtggaggttgcagtgaggcgagatcgcaccacagcctgggagacaagagtgaaatgccgtctcaaaaaaaaaagtctagagctgatgccaggagtgccatggagtagtcccgaaaggctgcctggaggaggtggcctctaaagtagctcttagagatgaagcaggatagtaggacccccatgtctgtgctggcttggcatggtgtgtgcatcagtgcagacccattcaatctggaggtgtcagggcaagtcacccgggacaagatgcttcccttctctgggctttagtttccatatcttttgtccagtggacacaataatgtctggttttcctagagctttctagagcatatttgcatactgagtgagacgccaggcatgaagcagagctgctaaggggtgtagagtggtcagagtgttcttttggtgctgttttgggacatctagttcaatctcacaagcacttatcgagggagggcctgtttgtaaatataatatctgcaacctggaagtgcaccagttatagggtagagtgaaaagctgggggcgtgggccagggttgagattgggaccccagtgaggtctctgagtgattatctgggaaggcgatattgggatgatagcttgggacagtgtgtagcactgtgttcggagttttattggttaagattcctttgattacaagaaacaaaaacccagtgtcatctggttacgcaaaagatggaatttatggggaagaaagcagggtgccccagggaactgaaggggaggaagcaaagccagagctcaggagtggttgaaccaggaactggaaacccgttgccatcaaaatcccagctggcttctttgcagacatggataagctgatcctgagattcacatagaagttcaaagataatcttgaaaaaggagaacaaagttggtgcactcattcttcctgatttcaaaacgtatcgcggccaggcgcgatggctcacgcctgtaatcccagcactttcggaggtcgaggcacgtggatcatttgaggtcaggagtttgcgacaagcctgaccaacatggtaaaaccccgtctctactgaaaatacaaaaattagcccagtgtggtggtgtgcgcctgtagccccggctacttgggaggctgaggcaggagagtcgcttgaacccaggaggtggaggttaccatgagctgagatcacaccattacactacagcctgggtgacagagtgagactatgtctcaaaacaaaacaaaaacagaacaaaacaaaacaaaagtattgcaaagctatggttattaagacagtgtggtacggacataaagatggacagacagatggatccagtagaattcagagttcagaaataagcccttgcatttctggtgaattgatgaggcagccaaatgcccactgttggggctcctgagtcaccaagatgcctcctccctctgcctttgctgggtgaggcatctctccttctacagcagctcactgcattccctgccatgtagcggatactcctgggctgcagcccaggctccctggttgccttggctccctccccaaggacctggtgtccttggtgcctccccaggtgtccctgaggcctgcagctctgacgacaggggtctggcctcaccgttatgaagcattcactgtgtgctcaggcttcgttgcactgttttcctgaggctttgcacccacctcatgaagcaggcaccaatcctctctgcattttacagataagaaagtggagactgagagagtttaggaaacccgttcaaggtcttcagggaggaagtcacagagttgggatttgaatctgggtctgtgttttgtgtgtggagctgagtggttctcacacctgcctcccgccctactttcccatattctttccctgatgttctcaggggctgtgtatatagaatccgtggccgcagaatgcacctccgcctccacgacaccgtgggtgagaaggccgcccctggtttgctggggcccatccccttgctggaggcctggattgaatggggtctgtggtgcctggatgagttggacactcagaagcaaggatttacttaactgcagtgcaggggtacaggggctatggagccacgttggaatgctggaggggaggtggcaacggtaccacgcaggagaaggaggcttgtgtgtgggatatagcctcaggctaacacacaggcaaatcgttcacctctctgggtcagtttccccgtctgtaaagggttggattagcgtccagccttctctcttccagccttgacgttctaggagtttgcattcatgccttgaatcctttcgtatttttctcaggaccttggtgatggtaggcgctcgctgttgagtgagtgaatgcatggctgtgtgaatggaagtctctgagagcaggggctctgtgcattacatccctgactccttagggcctacccagtgcctggcacaaaacaggttttcagtctgtatttgctgaatgaatcaacatgtgtcatcatggttggcccatcacatgcaggtggaaggaaggagagaaagaggcaggctcagcgtgtggggatccctcttctccagtccgctctgggggccagctgggcatgaggtccctgtcgggcaggtgcctggggttttcttgtggagctccttgaaggagcagccggaacgggaggatctgagctgggagcctccgagacactcctcttgtcctttatttcttttttgagaccgcgtcttggtctgttgcccaggctgcagtgcagtggtgcaatctcggctcactgcaacctccgtctcctgggttcaagcgattctcccacctcagcttcccaagtagctgggattacaggtgtgcaccaccacgcccagctattattattattattattatttttgtattttagtagagatgggggtttcaccatgttggccaggctgatctcgaactcccgacctcaggtgatccacccacctcagcctcccaaagtgttgggattacaggcgtgagccactgcacctggccaaaacctctgctcctttttgctaccctctgtgctctctccacagagacccctgcatctttgctaaagaaagagatgcgtgtatgtgtgtgtgtgtgtgtctgtctgtctgtctgctgcatgggctccagctacctgaggtgaccgtcatgcacaggggctggctgcggtggcctggagtgagcacgtgaatggttcagggtagcctgtctccactgctggagcacattctcatgcacactcctgaggggtggggaagtctaaaatccattgccttgtaggaaaaaaatccagcttaaatttaagtgggtggctgcagcccttggtccctagaagtggcacctctggagagggatgaagcccatgatgggacctgggtgcagctgtgctctgtgatttcttccctaggagaaggacggggagggcctggaggagctcctgcttggctgggccagcatgtcagttctactgtggtttggccagaagataccacacagccaccgctattctaagtttcagatttaaccagctaagaattgaaaatcctgctagaaatgaaggggccatgaaggacagggctcagtgtgtctccgggcagctttcctaggtccctggggactccagtgtcagctgctggagacattgtccatgagagcaggggcttgccacagccaggaagcttgatttcttctctgctacaacctttttattattattattattattattattattattttgagagggagtctcgctctgtcgcccagtctggagtgcagtggtgaaatttcggctcactgcaacctccacctcctgggttcaagcgattctcctgcctcagcctcccgagtagctgggattacaggtgcggcccaccgtgcccggctactttttgtatttttttttagtagaggcggggtttcgctgtgttggccaggctggtcttgaactcgtgacctcagatgatccacttgtctcggcctcccaaagtgctgggattacaggtgtgagccactgggcctggtctattattattatttttatttattattattatttttgagacagagtctcactctctctcaggctggagtgcagtggcatgatcttggctcactgtgacacctctgcctcctgggttcaagtgatcctcctgcctcaggaccatacccaactattttttttgtatttttagtacagacggggttttgccatgttggccaggctggtctcaaactcctagcctcaagcgatccacctgcctcggcctcccgaagtgctgtgattacaggcatgagccactgtgcctggtctgccacaaccctttaaactcaggcttccctccccatgctgtgagaattatgcacaacatggggcacgtttttgtggctaatttttgtatttttagtagagacggggtttcgccgtgttggccaggctggtctcaaactcccgacctcaggtgatccgcctgcctcggcctctcaaagtgctgggattacaggcttgggccaccgcctccggccgttgattccaatttaatgactcttttcattcaccagttgaaggccacacctaccaattcattcccccacctttggccactgggtctttgtttactgtagattacaagaattcttgaggcaccactacgatgttctagaaccctctggggccaactcatcttagtctgctcttctcctacacacctagggcatctgctgagagtttgctggggttgtcaaggacagggggagcttgaggtttttgggggtagacagctgagtcagttcagcctacatttactgggcacctacactctgcagggagacagttgccatggcacgggacaagggctgcgatgcccacagaaaggatggaggggggcctcctggagacctggtgatgcctgagctgtctccaggggtgcgtaaggtcagcagggaggagagaatgcactccaggtagcccgaccctcacgaaggcagtggggcgtgaagcagcttcagcaggtgggacctgggagcagttactattaccagacagaagcgagggtgggagtgcagggggctgggggaaggcaggccacgtctgggagggtaggtgagctatgctggaagtggggctggatcaaagggcttaggactaggggaatgctatggtgagctcgagtctgagagcccctctggctgactggaggggttagagaggaggcagggcggccaggaggggatattgagacagccacgtaaagaggtccccggagaccctccgctggcctgcgccctggggtgaggcctcgggaagttcgcactgtttccagcggggaggatcctggccattcctgtttggaggtggtaacctggggatccaacctgtgagatggaggcctgttaacaggaacctctcttgctttgctgagcttttttcctttcgcccagtaaatcccgttgttctcacccttctgtcgtgtccaagagcctaatctttcttggtggtgtgacaaggaccccgttttgagctgagctcaggagaaagtcccataatagcatggggctggagggagtggccttccctgcctggagctggtttggaaggtgtgggtgaaggtgagaagaagggtcagctgaggactctcagaaggcttcctgtgagcgctgggtggatgctggtcccattcatggagacggagaactagcgagtttgggcagtttgggcggggaaggagggagtaagactctgaatgtaaaatcttccctccactttccactctcctgtttggtctgtctgagacccaccatatacctcctgccctgtggaagggggcagaggagagagcagcatcctgagggccgtgggggctggtctgcggcctgggaagcagctgcacggcgtcccctcgctggcccggctcggctcctgggtgcctttggcaggtgagttccaggtgagcactggccggtgtggccgcccttgtgactgacagctggccacaccacagaacccactgttagataccctccaggtgggtcgaggagaatgtgcccatttctgtcttgagtggcagactctggttcgttgatttcttcaggatgggccctgtgcctgaggacagtgttggcatgtgtgggggcatgtgggtgtgtgcagatacgtgtaggcgtgtgtgcacgctcgcccatgcaggtggacgtgagcgctgagggcccatgtgggtgcctatgtggtgccttttttggctttagcgagttcctatggtaaccatgaacatgcctgttttgggatctggagtctcggggcgtgcgtggctgcagggagaagcagggaaggcgagcgcttagccggtggttggcttgatttcattaccaggcaccggggctgctcctggaggtaccatttgccaggcggcaaggtctgcagactccaagacccatgtgctcctggccctcctcctggccagtccctgccatgcccaggaagccctggtgagtccctgttctggtttctcattggacaaacagctccccggacttggccaggtcttgtgggtatctgctgatgggcaggcagggagccggctggcagccctggccagtaggtaccaggaattggggctcttctgagatgagtgtgggacagtgggcaggaggggctttgcctattcacggagcccgtgagggtgttttccatgtggctggtggagtggcatggtccttgtgggtcccatggacagggctaaccgtgtgagtgtgagggtatgggcaaggacgccggagaggaaaatgtggaccgggtggcctgtggcccgccagccgagacccaaccatccccggaggcccccctcacccctctcagctccccgggtcctcatgaacccccaggcctctggccatgcacttgggcttcctcgctggtctccccaggcccagaggcctgctggcctggcctggatgggaagactcacggtcctgtggaagaggccagagggctctgcccggctcgctgggagctggatttggccaaggccggggaagaattgctcccacttggctctggagaaagactcgtgcctccccagattgtgcaccccctggtgcttcttgtctacacactgcagacccatgggtgtgtcaggacacccctctccagccaccgcgggagaggctcttgatggacaggggcccaagcagccctcaggggccgtacagagacgacgctggtgtctgggagcggggtggcaccttctatccccttcctcccgctggctcctctggggcagctagcagggagttggggatgtgagtgtcaataggggctgtcagtggcccctctggcttgtgctgggaccctcccctccccccgccccaccccaggagttccttcctctgcctctgagaaggctctgggtgaggctatgctgggaccgggggctgtgtgtggagcaggagttgctagggctggacagagggctgaggccctggtgaagggcgaggggagcaaatgtggaccttgcgagctttgtctggaccaccccggccttccctccctgggaggcagagtccagaacctaatccccgatggccttccctgggggcgctgggagagggagaggggaaccttcaggagagacccccagatctctagagtctttgaatcttagggcttgagatttaaaaagtcaaattagtcgttttttttttttaattatactttaagttctagggtacatgtgcacaacatgcaggtttgttacatatgtatacatgtgccatgttggtgtgctgcacccattaactcgtcatttaacattaggtatgtcttttaatgctatccctcccctgtccccccacccttttttttttttttttttttttttttgagacggagtctcgctctgtcacccaggctagagtgcaatggtacgatcttggctcactgcaacctctgcctcccaggttcaagtgattctcctgccttaggctcctgagtagctgggattacaggcatgcgccaccacacccggctaatttttgtatttttagtagagatggggtttcaccacgttggtcaggctggtcgcaaactcctgacctcgtgatccgcccgcctcagcctcccaaagtgctgggattacaggcgtgagccaccgcgcctggccaacaaaagtcaaattagtctttatgcaaatctcctgtgcccctaaaactagtcacccaggctgagcttggttacctgtggggacagtgagctcattaccttgtatggatgcctattttattgtagtacaactttgctcgaagctgaccgctgttttcatctggaatctctgtaactgcattgctcggtccagtcttgacccttggcccgcacgtccccacttacccccattcaacaaggttcacccctctttccactaagagccctgcagacactggaaggctgctttttcaccctgagtcttcccttccctccccttggctggtcaccccggcctctgcagctatatttgggattcctcacctgcctgggctgatctttgtcggaagggttcaggttttgcaggcaccctgcaggagccccatggacacgaggatggacagctagaggcgatgggcctcaccctccttatttacagatcagtaagctgagaccctgagcaggggtgctgctaacttgcgataggacaacacagaggtggtcagggcagggtcgggacgtgaggggctgctcttgtcgtctgtgacgtgctggcccctggttcttttcctgcttctccatcagctccatccttgctgctttctgacttggaccctcagctcttgggcactgcaagaatgctggcctgtcttagcggatcttccattttataacagcagctggaaatccgtttctttgtgtgtgtatttttttgtttttttgttttttgagacggagtctcgctctgtcacccaggctggagtgcaatggcacgatcttggtgcattgcaacctctgcctcccgggttcaagtgattctcctgcctcagtctcccgagtagctgggattacaggcatgcgccaccatttctggctaattttttgtatttttagtagagacagggtttcaccacgttgagcaggctggtcccgaactcctgacctcaggtgatccgcccacctctgcttcctaaagtgctgggattacaggcgtgagccactgcgcctggcctgatttttgtatttttactagaggcgaggtttcaccatgttggccaggctggtctcgaactcccaacctcaggtgatccccccagctcggcctcccaaagtgctgggattacaggcatgagtcactgcgcctggccggaaatctggagttttagacaaaatcttgacaactaactgcagactttaaagaacagagctggccgcagcctaccctgcagaccagagtcagccggaccctctgctctgctcacctccttaggcctcagctcttgtttctttgtggctgactcccaagtccctctccccaggtcatccccaagaacagtgctcttgccccgacctcagtggctggctggtcatttcggctctgttcccagactgaactgactctcaattaaccttttctctctttcagatccagttcttttctgtcactgggttgagaagcctctgagtcatgggggggtggttcctcctgtctcccggttcaggcccattatctcctgcccagtgacacaggctttctaattaacctcctcctccggtctctgccagctgtgactaactcttcatccctcaagctggctccagctctgccttccctattactagacgctggcccgaaggcagaccttgatagtgctgactctgatgggcttctcatgccaggatgctggtgtagggacccccagcccccatctggtggggggctgtctttgggtcacagcaaatagtttgtttgttccttccttccctcccccaggacggtggttctcaaacttttctacaatttggtttcacctggaggtgcttttaaaaattctgatgccggctgggcgcagtggctcacacctgtaatcccagcattttgggaggccgaggtgggtggatcacctgaggtcagaagttcgagaccagcctgaccaatataatgaaaccctgtctctactaaaaatacaaaaactagccaggcgtggtggtggttccctgtaatcctagctactcaggaggctgaggcaggagaatcgcttgaacccgggagatggaagttgcagtgagccgagatcgcaccattgcactctagcctgggtaacaagagtgaaactccgtctcaaaaaaaaaaaaaaattctgatgcccaggttgtacccagttccaattaaatctgaatgtcggagggtagaacccagcatcagtacttttttttttttttgagatggagtctcgccctgtcgcccaggctggagtgcagtggtgcaatcttggctcactgcaacctccgcctcccaggttcaagcgatttctcctgcctccgtctcctgagtagctgggattacaggtgcatgccaccatgcccagataatgttttgtatctttagtagagatggggtttagtagccatgttggccaggctgacctcgaactcctgacctcgtgatctgcctgcttcagcctcccaaagtgctgggaatacaggcgtgagctgcggtgcccaactatacttttaaaagatcccccgttcattccaataggcagccaaacctgggaagcacttccccaagggatacacaagtgtggtgaccgtcagtggttgggcaatgactcaggtcaggctggatgttaaaatgggctcctggtgggcgtgagccctctgggccagggcttctggtaacatttgaggctggctgactctttgttttacggtgccatcctgtgcgttgtagggtgttgcgcagcctctctagcctgtatccacaagatgcccacaacccacccctcactgtgataatgaaaatgtctccaggccaggcatggtggctcacaaatcccagcactttgggaggcccaggcaggtggatcacctgaggtcaggagttcgtcgagaccagccgggccaacatggtgaaaccctgtctctactaaaaaagtacaaaaaattagccgggcatggtggcacgtgcctgtaatcgtagctactcgggaggctgaggcaggagaatcacttaaacccgggaggcggaggttgcagtgagccgagatcgcaccattgcactctagcctgggcaacagagtgagactccatctcaaaaaaaagaaaaaagaaaagaaaaaaagaaaatgtctccagacgttgctctatttctggggcagtggtataaaatctccccgactccgttgaaaactactgttctaggcctagtaggttcaccttgacagcattctcaaatattcacagaagaaaaggggcaaaggacaccaagtggggaccccagcttactgattgatttgtgggcttggcagtcaggcagcctctgtttaaatcctgactctaccagctgggtgaccttggacaagttacttaacctctctgtgcctctgtcagttctggttttgttttctcacaatcgtgcctcctcttgatcttcagctgcagcccgagggtggaacttgctgtgtgtggctgggcactttcgcctgtggctgtgctgctctgcccacagggaacatgcctttgctgccccttccctgtcagcatcagggtcacaacctgcccgtccttccagggccagcttccatgcagcttcctccacgcacagccccttccccatcggcatggaaggctctcttccttgtgcccctggggcagccggaacctcaggtcacatgcagctcctcccgcgccgtggggatctggtggtttctgtctgagttcctccccacttggggtctgagaccgtgggagcctctagcgtgcccagctcgggctgtctcactgtttgttacccaggtgaggtggctgtcccctccctaccttgggttgagctgtgaaccagtaggttaccgcagtgtggtaccaccccccccaaccccaacacccagctcattctgagagggtggagtgggcggaaatccgtgcctggcagaccacaaagccacataactgacttttgtagccctgccctggggtgttgggggggagggttgacggcagccattgcccctttcttcggtgctttgccaccagcagacgccccgtggaattgaggagctttgttctacgagctcgggaacgggacttgggagggacagcccctgtcccaccctgccatgccctgttcaaccctgtcaggcagctgaacgtaggctggacccatggctgcccaccctggctgcagtacagaatcacctaggggacctcgttaaaatgcagcttccggaccccaccctggggcttggggattctgcctcatcagcctgggtggggcccaggaaacctgtgtgttaccagcgctgaggtgctgctgatgaggcagctggcttcacagctgcacgggaaccagtgccgtttaaagcactttcccccacagtgcggctccagcagtcaggttcacgtactctgggtgacctggggcaggctgcgcaacctctctgtgccccagtttctttgtctgaggataataacagtacctgcacgtgggtgcgcttgttgtgaggcttaaatgagattatccaggtgaaatgggaacagagtgcctggtacctagtgctcaacacatgtaacctgccttaacatctctgatattattattattattattattattattattattattattattgagacagagtctcgctttgtcacccaggctggattgcagtggcataatctcagctcactgcaacctccacctccccggttcaagcgattctcctgtctcagcctcttgagtagctgggattacaggcgcgcaccaccacgcccagctaatttttgtatttttagtagagatggggtttcaccacgttgaccaggctggtcttgaactcctgacctcaggtgatccgcccaccttggcctcccaaagtgctgggattacaggcgcgagccaccgcacccggccccatttccgatattaacaacagtcctgggctgtgcggtcacacacgtgtaactgtgcgatgtgccctcgtgcctgcaggcgtacctacgcaggcacactgagcattgtgtaccgggacccaggcctccctgctgaggacagagcatccctgtggtacatgcgtggacgcagtcactggctggacgtggtcagaagggcagacgtgtgtgtacacaaggcccagacaagcgggtttttatttgattcacactctgaccttattccttgagttagcagcacctgggctgagctctgggagcccaaggtgccccttgtttccatagcaaccataatctggtaaaaataggcgggggagggaagagctggaagaggcccgagccggctccgggggcatcctgcctgctaaggtccttttttccacattgctgaccatacagaggtgctgttttgttttgttttttttttttcttaggataatgacatgcaaacctctgagtactcatgactcagaattgacacttgttaacattttttctcattttcatcaaaccctcttatttatttatttatttttgagacggagtctcactctgtcgcccaggctgaagtgcagtggcgcgatcttggctcactgcaacctccgcctttcgggttcaagcgattctcctgcctcagcctcctgagtagctgggatcacaggcgcccgacaccacacctggctaatttttatattttttagtagagatggggtttcaccatgttggccaggctggtctcgaactcctgacctcaggtgatccacccacctcggcctcccaaagtgctgggattacatcaaagtctttttaaaaaactgtgttaaaatatacatattataaaacttaccatttaaagcatttttaagtgcaccattctgtgacattaagtacatttacaatgctgtgcaaggatcaccattatttctagaagtttttcatcatcccaaactgaaacttcgtatacattaaataataactccctattccctcatctccacagcaccctgcagccaccattctgctttctgtttctatgaatttgactgctcggtgaactgtgtataggtgaaatcacacagtacttgtccttctgtgtctggcttatttcacttcccataatgtcttcaaggttcatccatgttgtagcgtgtgtcagaatttcctttttttttttttttttttttttgagatggggtcttgctctgttgcccaggctggattgccgtggtatgatcttggctcactgcagcctccacttcccaggctcaagcgtttctcgtgcctcagcctcctatgtagctgggattacaggtgtgcaccaccacacaaggctaatttctgtatttttagtagagatagagatagggtttcgccatgatggccaggctggtcttgaactcctgacctcaggtgatccgcctgcctcggcctcctaaggtgctgggattacaggggtgagccaccatgcctggcctagaatttcctttccttttaagactgaataatatcccattgttgcatgtatcacattttgtttatccatgtgttcactgatggacatctgagttgcttccaatttttttttgctgttgcgaataatgccacagtgaacgtaggtgtataaatatctgggtctctgttttcagttcttttgggtatctatttaggagcagaattgctgatcgtatggcaattctatgtatagttttttttttttttgaggcagggttttactgtgttgcccaggctggagtgaagtggcatgatctcggctcactgcaacctccgcctccctggttcaagtgattctcctgcctcagcctcccaagtagctgggatcacaggcgcctgccaccacacacggctaaattttgtatttttagtagagacggggtttcaccatgttggctaggctggtcttgaactcctgacctcaggcaatccaactgcctcaacctcccaaagtgttaggattacaggcatgagccactgcgtctggcctctatgtttaattgtttttgttttgttttgtttttgagatggagtctggctttgttgcccaggctggaatgtagggcacaatctcagctcactgcaacctctgcttcccaggttcatgccattctcctgcctcagcctcccgagtagctgggactacaggtgcccacgaccacgcctggctaattttttgtatttttaacagagacggggtttcactgtgttagccaggatggtctcaatctcctgacctcgtgatctgccctcctcggcctcctaaagtgctgggattacaggcgtgagccactgcgcccggcctctatgtttaatttttttagctttttttaaaattaaagaaataaaacacacacataaagttaagttccggtcatcatttctgcttgcctccgttcctctatttcttccatccataggggctaccattagcaggaattttgtgttttctctcagcccactttatttatttatttatttatttatttatttatttatttatttatttatttttgagacggagtctctgttgcccaggctggagtgcagtggtgcgatcttggctcactgcaacctccgcctcccggttcaagtaattctcctgcctcagcctcccaagtagctgggattacaagtgcgtgccaccacgcccggctaatttttgtatttttttttagtagagatggggtttcaccatgttggccaggctggtcttgaactcctgacctcaagtgatccacctgccttggcctcccaaagttttgggattgcaggtgtgagccaccgtgcccggcctcagcccacatttttaatgctttcacattcatacacaggtatctagaaacatttatagtttttgtgtgcattaaaaagggacatacctgacatccttttgaatttgtgtgaggtggcgttctggcgctagattgcctgggttcagatcttggctctgacacgcagcagctgtgagacctcaggcaggttccttcatctctccatgcctcccttttctaatctttgaaactggactaatagcaaagcctgaaacctactgcaagggttgttttggagactgagtaagtttatacatgtctagtgcttagaacagagaggggatgtagcagacacaggatggatatattaccattatcgttctgcatgtgtgtctgtccacatggttgtaaagtctattttttttttttttgagacagagtctcactctgtcgcccaggctggaatgcagtggcgcgatcttggctcactgcaagctccgcctcccaggttcacgccattctcctgcctcagcctcccaagtacctgggactacaggcgcccgctaccacacccggctaattttttttgtatttttagtagagacggggtttcaccgtgttagccaggatggtctcgatctcctgacctcatcatctgcctgccttggcctcccaaagtgctgagattacagatgtgagccaccatgccttgctttttttttttttttctttttttggagactgagtcttgctctgctggagtgcagtggcaggatcttggctgactgcaacctctgcctcctgggtacaagtgattctcttgcatcagccttccaagcagctgggatcacaggagcatgccaccacacacttttttttttcttttttgacggagtcttgctctgtcacccaggctggagtgcagtggtgcaatctcggctcattgcagcctctgcctcccgggttccagcgactctcctgcctcagcctcctgggtagctgggattacaggtgcatgccaccatgcccagctaatttttgtgtttttggtagagacggggttttttggccaggctggtcttgaactcctgacctcagatgatccacctgcctcggcctcccaaagtgctgggattacaggcatgagcctcagcgcctggtgatagatctagtttcttctctctttctccttttttttttttttttgagacaggatctcactctgttgctcaaggtggtgtgatcctggctcactgtagcctcaatacccccagggctcaagtgattctccaacctcagcctcccacgtggttgggactacagcatgcaccaccatgcttggttaagtttttaagaaatttttgtagagatgaggtttcaccatcttgctgtctcaaacttctgggctcaaatgattctccaaccttggcctcccaaagtgttgggattacaggcgggagccaccacttctggcctagttttttctttttggtgccatgcatattaatttgtacaaatagatcacattttttttgtatcccccattgatcccctcttgctggacacctaggtcgtttccattttctgatattgcaagcaatgctgcaggcagtggctttccccttgcctggccctctgtgcgtttgtgtgaggtcatgaggggtacctagaggtggggctgttgggtcgcagctctactggatgctgccagattgccctcaagagaggacttaggctgggcgcggtggctcacgcctgtaatcacagcactttggcaggccaaggtgggcggatcacttgaggtcaggagctcgagaccagcctggccaacatggcaaaaccccgtctctactaaaaacacaaaaattagccaggtgtggtggcgggtgcctgtaatccagctactagggtggctgaggcaggagaatcacttgaagacgggaggcagaggctgcagtgagctgagatctcatcactgcactccagcctgggcagcaatgagagacaccgtctcaaaaaaaaaaaaaaaaagaggacttagtattttcactgctcccaattctatgattcccattccccacgtcctcactgatgtttgattttcatgttgatttgagtgacagaagcatattttattttattttattttgagacggagtctcactctgtatagtggcatgatctcggctcactaaaatctccgcctcccgggttcaagcaattctcctgcctcagcctcccaagtagctgggactacaggtgcccgccaccacggcccggataatggtttttttttttttttttgtatttttagtagagataggtttcattatgttggccaggctgctctcgaactgctgacctgttgatctgcctgcctcggcctcccaaagtgctgggattacaggcatgagccaccgcgtcctgcctattattttattctttattatacaaacatgaacagatctctgaataagcgcttggaaaccctcatggctccactgtcagatcgctgtgtctgagcctccctcgagtccctctccacaggcccagggatgcgcttctcttcaccctttttctgtgtcacaagcatttccatatattgctacattcttttttcccctctttaaaaatagcacttttcctgattataaaaatagtacatgctcactgtagaacatttagagaatatgtacaaatagagattaaaaaataaaaatatgacccatcacccaaaatgttatcattctgatgtatttctttacaccttttttttttttttttttttgagacggagtctcgctctgtcgcccaggctggagtgcagtggcacgcttacagttcactgcaacctccacctcctaggctcaagcgatcctcccaccttagcctccggagtagctgggaccacagcatctgccaccatgcctggctaatttttttttttttgtagagatgaagttttgccatgttgcccaggctggttttgaactcctggtctcaagcaatccatccgccttggcctcccaaagtgctgggattacaggtgtgagccaccttgccccgccaagtgtggtgttttaaatttaagtgaattaagtacaattaaaaatgcagctcctcggttgcactagccacatctcaagggctcagtagccacatgtggctggtggctaccatagggaacaacgcaggtacagaacattacagaacattttcatcatcccagaaagttctactgtacagcgctggttgagaatgaggtccagactcccctggaggacttccaagggctggacaagcccagagagtctatgctgtctatgatggattacgcactgcagaaacgtccctggacccccaggccagaaggcatctgaaccgcataaagccagtgccaccgggtggtgctgaggaggaggaggcggcaagctggtgtctggggcagtgaggatttcagatgcagctcctgcctccttgggcagacagaactgtcacctccagggttgcccaatcccatggtcagcacccagttcaagcataatatgtcgtgggtcctggtgtctcttgcattcacgcacacacacacacaggtatgtaccattgagacatgaccacgcagggtcacccaggttcacacatacagcctcattcatgctcagaaacagttccccaaaaggcacaaacacggtctttgccgattgccattataacagcaacaaaaatagctgttaggctgggcgccgtggttcacgcctgtaatcatagcactttgggaggctgaggccagaggatcacttgagcccaggagtttaacactagcctgggcaacatggtgaaacctcgttgccaaagaaaattaaaaaacaattagccaggtgttgtgtggtatgtgcctgtagtctcagctacttgggagtcaggtgggaggattgcttgagcccaggagtgggaagctgcagtgagctatgatcacaccaccgtactccgcctggaggacaataaaaccctgtttttttttgtttttttttttttttttttttttaagaaaaggtggctcacgcctataatcccagcactttttttttttcctttggggaaattttttttttaattatactttaagttttagcgtacatgtgcacaacgtgcaggtttgttacatatgtatacatgtgccatgttggtgtgctgcacccattaactcttcatttaacattaggtatatctcctaatgctatccctccccactccccccagtcccagcactttgagcggctgaggcagctgtgaggtcaggagttctagaccagcctgaccaacatggtgaaaccctgtctctactaaaaatacaaaaagtagccgggtgtggtggtgcgcatctgtaatttcagttactcagggagtgctgcttccttggggtgaggcacagccctgtggcgagtctcttggtaaagtgaaaaatgctgtaaatgggtggctgagatgggtgcagaggattggggtgtcatggggatggcgggtggcatggggctggcttccggatacctcatccctgacattttctctgttgacattggaacccaggatgtccagatgctgtttttgaagccctatcggccagggagtcaatgggcccccactttgcctgggagggctgtgtcctggtgtcctgtggggttttggtctcccaccccggggcctaagggcctcagaatgaactggaacccaacctttgtcaggggagccccagcaatgtctgcacgacatacgcccccaaacagcgtgggttcaggaatttgtaagtgtttgagaaagaaaaactgttaggattctagtttcgttgaaaagccattttgcctttgtcttcctctgggcacctgaccatccattcttagcccacctgagtattgagcatacactatcgtctctgcagtggaggtggtcctggacgcatggcgtaacgtgggctctctgggccctccagaaaagtgtgccactcgctcctctccggctgggccgtcagaacccacagctcacacacacatccagtcaaggtcagaagaggtggctgcattcctgactcaaggtcaaaagaggcaactacataatcagtgagtggccctgaggggccagtaagcaataaggcagcgggaaagggtgcagagcaattgtggagcaattactaagcaagcagaatgggaagcaacacgactgaacaagaaacagcacatggggccgggcacggcggctcacacctgtcatcccagcactttgggaggccgaggcgggcggatcacgaggtcaggagatcgagaccatcctggccaacatggtgaaaccccatctctactaaaaatataaaaaattagctgggcgtggtggcgggcgcctgtagtcccagctactcgggaggctgaggcaggagaatggcgtgaacccgggaggcagagcttgcagtgagctgagattgtgccactgcactccagcctgggtgacagagcaagactgtctcaaaaaaaaaaaaaaaagaaagaaagaaaaaaagaaacagcacatgggccaggtgtggtggctcacacctgtcatcccagcagtttgggaggccgaggcagatggatcacttgagattaggagttcgagaccagcctggccaacatggtgaaaccctgtctctactaaagtacaaaaattagctgggcatggtggcacacgcctgtaatctcagctacttgggaggttgaggcaggagaatcacttgaacccgggaggcggaggtttcagtgaaccgagattgtgccactgtactccagcctgggtgacagagctagactccatctcaaaaaaaaaaaaaagtccgggcatggtggctcacgcctgtaatcccagcattttgggaggccgaggcgggcagatcacctgaggtcaggagttcgagaccagcctcaacgtggagaaaccctgtctctactaaaaatacaaaaattagccgggcatggtggtgcatgcctgtaatcctagctactcgggaggctgaggcaggagaattgcttgaacctgggaggcggaggttgcagtgagccgagattgcgccattgcactccagcctgggtgacaaaagcgaaactctgtctcaaaaaaaaaaaaaaaaaaaaaaagaaatagcatatgggtcacaaattctgttgactaagtagaagcagaggcttggccagagaggaggaggaggcggcggctggagatgcctgtggtggttcgaaaggaagcacctggactgtttgagggaagcctctgtacaatgtccaattttaccccaaaacgtatcatgctgcctccctgcaccacttcctcttttaggagacaaggtgttgctctgtcccccaggctggagtgcagtggcataattgtggctcactgcagccttgaactcatggcacaagcaatcttcctgcgtagctgggatgacaggcatgtgccaccacacctggctaatttttaaaatgtttcttatagagatggggtcttgctatgctgtccaggctggtcttgaactcctggcctcaagtgatcctcccaccttggcctcctaaattgctggtattatgggtgtgagccaccacacctagtcccatcttccctttcaaacacaggcctagcagcagcatctctccagcctgtctccgcagggttgtttttggctcatgatttgggcaagaggagggagaagggaagagaagaaactttgctgttggaactgggtcagaattggaatacaggaagcaagaacatgagtgttcacgctttgactgagctgttgacagcaccgaggccagaggcaggagaaatgaagctgtttgtttatctgatgaatattcatcgagctcctatttgtagccagccgcctctgttttaggagccggggatccctttgttgaatcctggctctgccactcactgctggggttaccttgggcaaccgtctgaacctctctgagcttgttttcccatccggaaagtgaagataaggagcgtccctgtctcacagggatgtttgaggatgaaatgagctaacataggaaaagcacttagcatggtgcttggcgcagagttagtgctcgtgactgcagctgttactgaagacagagcgtttaggtgtgaagagggtctggtgcccgcatccaaggaactcacagtctctggaggaaacagacatttaacagtcatctgcaaagcatgaggcagtgccaatagagatattcttcctggtggaatgagggaaggcttcttgaaggaggcggcgctggaaggttgaaaaggaatccctaggaagagaaggttgcagggggcattttttttcttttttctttctttctttctgtttttttttttttttgagacggagtcttgctctgtcgccccggctggagtgcagtggtgccatctcggctcactgcaacttcctcctcccaggttcaagcgattctgctgcctcagcttcccgagtagctgggattacaggcacccaccaccacgcccagcaaatttttttttttttttttttttgtatttttagtagacacagggtttcaccgtgttagccaggatggtctcaatctcctaacctcgtgatctccccgcctcggcctccccaagtgctgggattacaggcgtgagccaccatgcctggcctgcagggggcatttcacactgaggaaacagtaagggcaaaggctgcgggtgggtggggaagtgtgtagagctgtttgagaagcggtgagccaggctctcgaaatggatggagggacatggcaggaaacagccagaggcgagggtggggatccgctcggggaggctctgagtgtgttgccggcgagatgacgggtgccctggaagagcgggatgggggaaccgcctgtctccttggtgacttgggaaggcggccttgggagctttggggatggattgcggaagggaggagatgcttgctgtgctcctgaggaggggtggggcctgaatgtcctcttggctggggttggaggggagggccaggctagggtcctaagaaggtgaatcctgagcccaggcatctagcccacgtgcagcatgaaaggaggatttccggccgggcgcggtggctcacgcctgtaatcccaacactttgggaggctgaggcgggcggatcacgaggtcaagagatcgagaccatcctggccaacatggcgaaaccccgtctctactaaaaatataaaaattagctgggcgtggtggcgtacgcctgtagtcccagctacttgggaggctgagacaagagaatcgcttgaacctgggaatgggaggttgcagtgagccgagatgacaccactgcacttcagcctggtgtcacagcgagactccgtttcgagagagagagaggagagaaagaaagaaagagagagagaaagaaagaaagagaaagtcccatggaaatgggggtttcacatttgggggatttgcaaagtagtcacgtgggtgaggcaggagggaagcctagtagcagagaagatgatgccttcggccttgagtgtggtgcgtttgaggagcttgtggatcgtcccaggggtgtgtgtggttgggctctttagctcaggagagctcagctgagtggatacccactcgcacatccaacagctctcattcccaaagcgtgttctgagtgtgagtcctacaaaagtggacaattcagaccctgttgggttttgtggcactttctagtcagggaggcagatgagaacagaatgaagaacgcagatggtttcagacagtgcccagtcctgcgaaggaaatagaacagtgaggcgatgagggtggggctcggggctgggggaaggggctaccctgggtgggtggtcaggaagagcctctccatagaagggacatttgaggcctggcgcggtggctcatgcctgtaatcccagcactttgggaggccaaggcgggtggatcacctgaggtcaggggttcaagaccagcctggataacatggtgaaaccccctctctactaaaaatacaaaaattagccgggcgtggtggtacctgcctgtaatccccaagctcttctcccagcccacccggcaccagccagtttgagctctgactgggaactgggatctcattcatcccatctggtcagcatctctttggttgctttttatcagcttcctattagaaaaaaaaaaaatccccttgaaaaacaagggggagggttcatacacgatcggttgcagcaggcacgccagtgacggtgggggcccagggggagcgtggcagaggctctcaggctggaggccagctactgctccggccagcccttccctgtgggggagccacaagaggccgtccctgggcctgcaagcatgagatgagccgagcacttgaccaaaactagtttgggtcttagaatttaacttatcctgggccgggtgcggtggctcacgcctgtcatcccaacactttgggaggccaaggctggcggatcacttgaggtcaggagttcgagaccagcctggctaacatggggaaaccctatctctactaaaaatacaaaaattagcagggtgtggtggtgcacgcctgtaatcccagctactcgggaggctgagtcaggagaatcgcttgaacctgggaggcggaggttgcagtgagccgagatcgcgccattgcactccaacctgggcgacagtgagactccatctcaaaaacaacaacaaacaaacaaaaataatactgcgatttcctagcaatgcccagtgacttaccctaaattcagtgaaagttgaaaaaaaaaaagaagtggcatttgaaggagacccgaaggaagaaaaggagccagtgtgaagctgtctggggaagagcattccaggtggtgggaacaggcttggcaggtgtgaagatgaggaaggaggcccctgaagagccggcgggaagagcgggtggatgggaacacagtttccccgtccgccagcaggtggcactgttggcccaggactgcccgggcatggctgggagagcaggtggggccgcgggttctttgacctcaggtttgtgattctggctgtgggctcatcacaggctctacctccaccctctggggagataagccctggccgggggcagaagagcagttgtaatggtttcctggctgttctccttccccaacgggtcttgctttcagtgtttctttgcttgctccctctccagaggtgacttccctcccggtttctgggtatctgtgtctttgctctctccttttgcttttctttttgctcccttggtctcttctcctccctctctcattgctccctgggggggcaggttcctgtctcaaagattaattacttgctttttttttttttttttttgggaaacctcgctctgtcgcccaggctggagtgcagtggcacgatctgggctcactgcaacctctgcctcccaggttcaagcgattctcctgcctcagccttctgagtagctgggattacaggcacccgccaccacgcccggctaattttttgtatttttagtagagacggggtttcgccatgttggccaggctagtctcaaactcctgacctcaggtgatccacccgcctcagccttaaaaagtactgggattacaggcctgagctaccatgcccggccaattacttgctttcctgatgtagctcagatggagcgggtggtgacttaggatcaggaaggtgctgtttctcatcccattgcctacccttccttcccgtggcttcagatctccataaagggctggggctggggtcgtgaccccgtcggtagaaaatggtcccagcgacccttctctcctggagcccatggacccacctcccagtgccatgccctgctcacctccagcccctctagcaggcagccctgtcttcatgtgagaagggagaactggatggcaaagcagatggcacagaacagctgcacaagagctcaccgaagggcttgttatgaaagagtcatttttgtcaacagaagtacgcttctgccctatactccgtgctctgtgaattatttctcaggggagactaagctggccagagcctggtggtggcctcctggctgtcggatgtcagagttagggctgcaggttgaggggtccttggctttggtctgtgagtaccatggtggttaagagcctggtctctctctcttaaattttttttttttttttttgagatgagattttgctatgttgcccaggctagtcttgaattcctggcttcaagagatccttctgcctcagtctctcgagaggctgggattacagttgtgagccaccgtacctggcagtctctttattttactttactttttcctctaaagttaaagtttacagtattttattttgttgtggtgagaacacataacatgaactctaccctcttaacagacttttaagtgtacaatacattattgttgaatgtaagtaagagtttactctcttaaagcctcccactgggtgggaagtctagcaccttacaacaggaccctgtaatcccagcactttgggaggccgaggtgggcggatcacttgaggtcaggagttcaagaccagcctggccaacatggtgaaaccctgtctgtactaaaaacacaaaaaaattagctgggtgtggtggtgcatgcctgtaattcgagctactcgggaggctgagggaggagaatagcttgaacccatgaggcggaggttgcagtgagccgaggagatcgtgccattgcactccagtctgggcgacagaggaaaactccgtctcaaaaaattaaaaaagatggccgggtgtggtggctcacgcctgtaatcccagcactttgggaggccgaggcgggcagatcacgatgtcaagagatcgagaccatcctggctaacatggtgaaaccccgtctctactaaaaatacaaaaattagctgggcgtggtggcgggcgcctgtagtcccagctactcaggaagctgaggcaggagaatcgcttgaacctgggaggcggaagttgcagtgagccgagatcacaccactgcactccagcctgggcgacagaatgagactctgtctcaaaacaaaacaaaacaaaacaaaaactaaaaaaaagattttgaacagtaaatgtatttacatggttggttctaaaaccaaaatgatataaaaatatatgtggtagaaagatttgcttgtactccaatccgccctgtccctacattctaaaattcactttgaggttctttccagtgcttctttattcacatgtaagatgagcatatccttttcttacctccactccccttccctcccttcccctcccctccccttccctcccttcccctacccttccctccacttccctcccctcccctcctctcccctccctttccttcccctccctcccctgcccttccttcctctccccttccctctttctttttctttctttctttttttgagatggagtcttgctctgttgccaggctggagtgcagtggtgtgatctcggctcactgcaacctctgcctcccgggttcaaggattctcctgccttagcctcccgagtagttgggactacaggcacctgccaccacgcccagctactttttgtatttttagtagagatgggatttcactacattggccaggctggtcttgaactcctgacctcaggtgatctgcctgctccagcctcccaaaatgctgggattacaggtgtgagccaccatgcccagcctcctatttctttttcttaaataaaaggtaatatcctacaaaacactgttttacatcttgcctttttctctggagaattcctgtctgaccactgagagctgctgctgcctctgccccattccttttaaaaataactgtgtagtatttaacggtgtggatttaattttagagactgatgattcctttcagaaatttaattttgtataacgtaagtaatataagaatacatttttggctgtgcatggtggctcatgcctgtaatcccaggaccgtaggaggccaacgtgtgtggattgcttgagcccaggagtttgagaccagcctggtgggggggcagcatgacaaaacctcatctctactaaaaataaaaaaaattagatgtggtggtgcacacctgtaatcccaggtactggggaggctgaggttggaggatcccttgagcccaggagtttgaggctgccatgagctgtgatcatgccattgcaatccaggctgggtgacagagtgagaccctgtctcaaaaaacaacaacaacaacacaaaaaacaggctgggcgtggtggctcacgcttttaatcccagcactttgggaggctgaggcgggcggatcacgaggttaggagttcgagaccagcctgcccaatatggcgaaaccctgtctctactaaaaatacaaaaattagatgggcttggtggtgggtgcctgtaatcccagctactcgggaggctgaggcaggagaatcacttgaacctgggaggtggagtttgcaatgagctgagatcacgccattgcattccagtctgggtgacagagtgagactctgtctccaaaaaaaaaaagaaaacaaaaaaacccaaatcattttccttaaaacaatcagaacattaaagataaagtctcggccgggcgcggtggctcatgcctgtaatcccagcactttgggaggccaaggtgggtggatcacgaggtcaggagatcgagatcatcctggctaaaacggtgaaaccccatctctactaaaaatacaaaaaattacccaggtgttgtggcgggcacctgtagtcccagctactcgggaggctgaggcaggagaatggcgtgaacccaggaggtggaggttgcagtgagccgagatcgcgccactgcactccagcctgggcgacagagcgagactccatctcaaaaaaaaaaaaaaaaaaaagataaagtctcctatggccagcagtgacattccctttctctcctccccagagtagccactgttcagagtttggtacatacttttctagatatttaaacagggctgggtgcagtggctggccaggtgcattgactcactcctgtaatcccagcactttgggaggccgaggcgggcgatggctcgaggtcaggaattcgagtccagcctggccaacatggtgaaaccccatctctactaaaaatacaaaaagtagctgggcgtggtggcacttgcgtgtagtcccagctactcggtggggggctgaggcaggagacttgctggaacttgggaggcagaggttgcaatgagcgagatcgcaccactgcactccagcccgggtcacagagcaagactgtctcaaaaaaacgaaaacaaaaacaaaccagtatttttacatgtaccttaagtaaccatcaatgtccatacatacacagttagctcattccttctaatcacagtttagggtccagcttacaaatataccacaccctgcttatctgtttctcctgtaaatggttgttcttgataattttttttttttttttagatggagtcttgctctgtctcccaggctggagtgcagtggtgcaatctcggttcactgcaacctctgcctcctgggttcaagcgattctcctgcctcagcctcccgggtagctgggattacaggcacacaccaccatgcctgatttttgtatttagtagagatgaggtttcaccatgttggccaggctggtcttgaactcctgacctcaggtgatccacccgcctcagcctcccaaagtgttgggattacaggggtgagccaccgcgcctggcctgttcttggtatgtttttactcttatgaaaagtgccgaggtcaggagatcgagaccatcttggctaacacggtgaaaccccgtttctactaaaaatacaaaaaatgagccgggtgtgttggcgggcgcctgtagtcccagctacttgggaggctgaggcaggagaatggcatgaacctgggaggcggagcttgcagtgagccgagatctcgccactgcactccaacctgggagacacagcgagactccgtctcaaaaaaaaaaaaaaaaaaaaaagaaaagtgccacagtggacatcctcatagttgactgtctacacatgaaagtgtttctctagacttgagtgaatcctagatgtgagattgctgggtgatagggtaggtgactttctatttcatcatactgcaaattgcctgccaatttctatgccactagtaggagtgtacatgttgcttgtctgttgggtgaagcatcctgtctccttgctgtggttgcattccctgatttccagccctctgagcagctctggctgtgtcctgcgtgctgtaccctccgcccagagaagcactgtcctccgtaagtcaggtggactctcggcctctgaagttcctgcacccgcctggtgtctttgcagcatggtcttttgctgagaataacctcgaccttctccttttcaaaagccctccagagggctttactgaccagagaggtggctagagagttggctgtgggattgaccacactgacttccccagacccatcttaagaggctggctttagattttcatcctatcccagttcttaagatgtaagttctgccctgagggcccctgggggaagccacagcttaaagctcaaatgcatttcccttgctgaaggagctgagccagccaattccccttgtgctagttcaggggttttgtctgccaatctcaaacccaggaacaagttctaagaactgggtcccttgagagacctagagtctggcagttgggtgggaagaggattgaccttggagacagtttctgtcacctacacccacctcctgagaaataacttcaagagaggaaggaccatcttggtcgaggtggtatctcacacctgtaatcccagcactttgggaagctggggtgggcagatggctcgagcccaggagtttaagaccagcttgggcaacgtggcaaaaccccatctctacaaaaaatacaaaaattagctgggcatggtggcaggtgcttgtagtctcagctactcaggaggctgaagtgggaggactgcttgagcccacgaggttgaggctgtagggagctgtgatctcatcactgtactccagcctgggtgacagagtgagaccctgtctcaaaaaaaagaaaggaccatctcatctggtcctctgcctcagttcctaccccatttactataccactgaatccttcaccatccacctgacctttatttaaattaaaataaattaaattaattaattattattattattttttgagatggagtctcgctctgttgcctaggctggagtgcagtggcgtgatctctcctcactgcacactccacctcccaggttcatgccattctcctgcctcagcctcccaagtagctgggactacaggcgcccgccaccacacctggctaatttttttttgtatttttagtagagacagggattcaccgtgttagccaggatggtctcgatctcctgaccttgtgatccacctgccttggcctcccaaagtgctgaaattacaggcatgagccactgcactctgccattaattaatttttctgagatggagtctcgctctgtcacccaggctggagtgcattggcacgatcttggctcactgcaaactccacctcacgggttcaagcgattctcctgcctcagcctcctgagtagctgggattacaggtgtgcgccaccacaccctgttaattttttgtatttttagtagagatggggtttcaccatgttggccaggatggtctcgaactcctgacctcaggtgatccgcctgcctcagcctcccacagtgctggaattacaggcgtgagccaccacaaacttgttgttaatggtcactcattgtccgtggttgtcacatctcttttgtctctttaaatacagaacagagctgggtgtggtgaactgtacttccagctattcaggaggctgaggtgggaggatcattggagcccaggagtttgaggctgcagtgagctatgatcgcaccactgcattccagcctgggtgcattccagagtgtgaccctgtctataaataaatatagaacagcagacctggcaaagttgtttagtagaacgtctcacattttggatttatctgaatgcttcctttttttattccccaacattttcctggaatagtccttgattttacggaagaaagatgaaatgagtagcttgtgtgctgacagtgaagaggaagggagacactcctgttttatctgctggggccagatttgtgccagccctgccttttccttgggtgtggttgagaggactgtgcgcagaccgcccccagccagccactggcggggtgtgttggtgcatctggcactggcggggtgtgttggtgcatctgggtgttaggaggtaggtccaggggcttctcctgggaagttgtccccatgtcgccttcggggggtgctccctgtgggagaatgagtggtgtggtcgtcccccttgcctgaagctgttattttgttccctcctgtgtttccttgccggttgggtagaggtctactatgttcactaactaggttactagtgacagaaaccttactcaaactggcttaagaaaaaaaaaaagaaaccaaaaggaaaaacaaagtccatgaaaacttttgtaattggtaagtttaaggaacctggctttggccgggtgcagtggctcacacctgtaatctcaggacttggggaggccaaggcaggcggatcacctgaggtcaggagttcaagatcatcctgaccaacatggtgagaccccatctctcttaaaaacacaaaaatcagctgggcatggtggcgggcaactgcaatcccagctcctcaaaaggctgaggtacgagaatcgcttggacctgggaggcggaggttgcagtgagctgagatcacgtcactgcactccagcctgggtgatacagcgagactcagtctcaaaaacaaaacaaaacaaaacaacaagcaaacaaaaaactggcttcaggtccagctagatccaggtgggtgagacagcatcatcggaccatctatttgtacctatctcttggctctaattcctgcatttatttcattcacaggcacctctccccacatgttataaggcagccactggcagctctagtgtgagctttgaaaatctcagtaggtatgattaagctgcttccttctatagcacctgtaaaaatttggtgttcactctgtttggactgacgaggtgtgtgcccattcctgaagcaatcgtagtggattggtgaatagagtacatgaattgaggccagtaacggtggctcacacctgtcatcccagcactttgggatgccaagacaggaggatcacttgaggccaggagttcaagaccagtgtgggcaacaaggtgagaccctgtcactacaaaaaattaaaaaattaactaagcatggtggtgcacacctgtagtcctagacacccaggaggctggggctggaggattgcttacacccaggaggttgaggctgcagtaagctatgattgcgccactgcactccagcctgggtgacagagcaagactctgtctctggaaaaaaaaaaaaaaaaagcatgaatttgaatttgaattggccaagcctgcatcgtgtacctaccccaaagctcaggctgggtaggttgagaaaggggcagccccgtataaaccacaaaaaccaacagtggtgtcagagtgctccccaggggagcatcaaggtactgtcagctagaggaaggggcctgggcacggagcaggcagaaaggcatattccgcttcgtctggtgatgggcatcgggagtctctggccgagtcagctcctcgtttcctggggctccattcctcttcattttggatttggcggaagtcagtgtccacaggaccatctgtgtcagggtgtcagccctgcttctttttttttttttttttgagatggagtctcactcagttgcccaggctggagtgcagtggcgtgaccttggctcactgcaagctctgcctcccgggttcacgccattcttctgcctcagcctcctgagtagctgggactacaggtgcctgccaccatgtccggctatttttttgtatttttagctgagacggggtttcgccgtgttagccaggatggtctcgatcccctgaccttgtgatctgtctgccttggcctcccaaagtgctgggattacaggggtgagccaccgcacccggtctcagccctgcttcttagtggctgtgtgatcctggacagaagagttagcctttctaggtttcggtttactcatctggaaaggagtatgatgttcatgttctttcttttttccttttttttttttttttttttgagacagagtctcgccttatcacccaggctggagtgcggtggtgcgatctcggctcactgcaacctccgcctcccaggttcaagcaattctcctgcctcagcctcctgagtaactgcgattacaggcgcccaccactgcatccagctaattttttgtatttttagtagaggtggggtttcaccatgttggtcaggctggtcttgaactcctgatcttgtgatccgcccgcctcggcctcccaaagtgctgggattacaggtgtgagccacggcgcccggccttgtgttccttcttgatggggctgacaggatccagtggagtggtaggtgtggaagtgcaggcagctggcgacatgctgaacccagggggtggtgtgtgctgccctgcaaggtgattcttctgctccagggtgagcagggcctgtccttggacttgctctttggagagttgggatggtgacctgtactgggatggtgacctgtactgggttgttgacccctcgggatgtgtggggtgattcttccacagatgaacatagcatggggcagaacactgtcccactgcgggaaccctttgctcattctccgagctccagatgaggaagggaggcgggtggaattggatgaattggcgcagtgattccgaaattgtaaccgggggagatgacatttggtggtaagaggacgggacacagcattccccgaaactgatccccggagagaaagctgtttattccctttgcagttctctttctgtgcagctcatcacttcaaggagaatgtctcagttaggggctaatatatgtctttaacacctttctaacatttgctaaccttccttattaacagagagagtgggtctcaagcctcaggccttgggcaggcgacagtgtttagcagactgtaataacattattcaattttcattatatttaccttttttctggtagacatttttttttaaggtttaaaaattatagaaaaggccaagtgtggtggctcaggcctgtaatcccagcacttttggaggccaaggcaggtggatcacttaaggtcagaagtttgagaccagcctggccaacatggtgaaaccctgtctctactaaaaatacaaaaattagcaggacatggtggcggacgcctgtaatcccagctgctcgggaggctgaggcaggagaatcacttgaacccaggaggcagaggttgagtgaaccagtgagccgaggtcacgccactgcactccagcctgggcaacacagtgagactctgtcttaataataaaaaaaaaaagaataaaaaataaataaaattacagaaaaattaagagtacagagagtccccataggctctataatccagttccctacaacttacattagtacgatccatttgctataattaacattagtgtggtccatttgctataattaacattaatatggtccatttgctataattaatgaacctagactgatgtatgatcattaataactgaaatgcatggtttattcagattttagagtttttccctaatgtccttttctgttccaggaaccacattacatttagttttcacagctccttagactcctcttggctgtgactgtttctcagactttgcttgtttttggcagccctgacagctttgaggcgtgcttgtcactcaatttagatttgtctcatatttttctcatgattagactgggtattggtttttgagaggatgactacccaggtatagaccaggtatagaaccatttttctttttttaattttttttgagacggagttttgctcttgttgcccaggctggagtgcaatgcgtgatctcggctcactgcaacctccgcctcctgggttcaagtgattctcctgcctcagcctccggagtagctgggattacaggcatgcgccaccacgcccagctatttttgtatttttagtagaaacggggtttcaccatgttggtcaggctggtctcaaactcccaacctcaggttcgcacccggcagaaccattttcgtcacatcctgataaccactgttgatgttggccttggtcacctggctgagatagtgttttgtcagatgtctccattgtaaagttattctttatttttaaatttttattgattgattgagatggagtctcactccatctcactccagtgtcactggagtgcggtggcgcgatctcggttcactgcgacccccacctcctggattcaagcgattctcctgcctcagcctcccgagtagctgggattacaggcgcccaccacaacacccagctaatttttgtatttttagtagaggtgggtttcaccacattggccaggctggtctcaaactcctgacctcaggtgatccgcccaccttggcctcccaaagtgttgggattacaggcgtgagccacagtgcccggctgttattctttattttcttccatccgtagtatactgttcacatctaaggagcagggcattatattttctttcttttcttttttcgctatgtttcccaggctgggctcaaactcctgggctcaacttgatctcctgccttagcctcctgagtagctgggactacaggcatgagccatcatgcctggcttatatttactttaccttctatttatgagaaatgattatatccatttatgatgtgaacataaagtcttggctgggcaccgtggctcacgcctgtaatcccagcactttgggaggctgaagtgagtggattgcttgaggccaggagttcgagaccagcctggccaatatggtgacaccctgtctctacaaaaaatacaaaaattagctgggtgtggtggcctgggcctgtagtcccagttactcaggaggctgaggtaggaggattgcttgagcccgggaggtggaggctgcagtgagccgagattgcgccactgcactccagcctgggtgacagggtgagaccctgtttaaaaaataaaaagaccggtgtggtggctcacgcctgtaattccagctgcttgggaagctgaggcaggagaatcgctcgaacctgggaggcagaggttgcagtgagccgagattgcgccactgcactccagcctgggcaagaagagctaaagtctgtctcaaaaacaaacaaacaaacaataaaaaacatgaagtctttataatattaatttataaaacatgaagtcttttcagtatttaatttaaaaattaagtccatttaaagaaaaatattaagtagagagaaaagttacaagagatatggggaattttttttttttttttttgagacggagtcttgctctgtcgcccaggctggagtgcagtggcacgaactcggctcactgcaacctccacctcccaggttcacgccattctcctgcctcagcctcctgagtagctgggactacaggcgcccgccaccacacgcggctaatttttttttgtatttttagtagagatggggtttcaccttgttagccaggatggtctcaatctcctgaccttgtgatctgcctgcctcggcctcggaaagtgctgggattacaggcgtgagccaccgtgcccggccgatttggggacattttaaaaagcaggaaagccaccctggaatggtagatgtcagagaaatgctgaaggcaggaagatgttgagagtatggtctgggaaaatggctggggctcagtgtcatctcctggcctgtttcccaaatccccttaagacaaggaacaggaagtgactgatgtagcctctgagaagtctcagacacagcgcagaggggccatggctaccccagggacgggtgtgatgactccctggggtcacggcttttcctccctcccttctctcgggctcctcctgaccccacagcattcccagcagtttctggcaggcaggtgaggagacctgggtcaggcaggctgtggcagctgcctgtgcaactggccctgtggcgtgcaagcctcaaccctctctacagctcagggtctgaaaggcggtgccaggtactgggtccttccgcccatgttatctagtttcctccacaacctgggggagtattggggtccttgtcattctcatcactcaggggaagagacctgtccaggtcaccagctggtcagggcccacgcttgggtaataggtgaatatttgacctcacacctttggatgtgaaacaagttacactcctttatttttctaaaaagtcttttaaaaatatgggctagccaggtgtgtggtggctcatgcactttgggagggcgaggcaggcaggtcacctgaggtcaggagttcgagaccagcctggccaacatggtgaaaccctgtctctaacaaaaatacaaaaattagccaggcgtggtggcacatgcctgtaatcccagctacttgggaggctgaggcaggagaattgcttgaatccgggaggcagaggttgcagtgagccgagatcgcgctactgcactccagcctgggtgacagagcgagattccgtctcaaaaaaaaaaaaaaaaaaaaaaataccacttttactaccctctaggaatggcatgaaatacagtagttttggagccctcccctccctagagttgcctaaaagccgtgggtgccctaagagagacctttgagtcgagccactgctttgacacctttccttggcaggctggtggtgtgaggctctgggtgtgagcatcctttagacgcccatctgagtttatgcctccagtgtcagggccgaaggtgggtctccatcctgagacctcgctgtcccaccctctcctcccctccagccaatccaattctgtcaagtcaaaagcctgggaaagtttttctggggcagaggaagctgaggctccagaacatggaatcctccttcttttctctctcttcctcccttccgtctttccccttcttttctttccatggtatttattgagggctagcgtagagcagacgccatcctgagtgtggggtagggcgatgactaaggtgtacacggtgtctgcctccgtggagtatacattccaccgggggctggtgtggggcaaatagacaagaaaacaagcacacagacaaatcagcaacaacaaaaaacccaaaacctcaacctggaataatacatgaagaaaacaagccagcggctaggtgcagaatcactaagggtgtgtcctgcaggtgagtggtcaaggaagccctctctgggaggcaacatgcttttgggataggtctatggtggagaaacaactcagttaatttccctttttttttttttttaatggtgtctcgctctgtcgcccaggctggagtgcagtggcgcgatctcggctcacggcaacctccacctcctgggttcaagctattttcctgcctcagcctcttgagtagctgggattacaggtgcatgccaccatgactgactacttttttgtatttttagtagagacggggtttcaccatgttagccaggctggtctcgaactcctgacctcaagtgatccacccacctcagcctcccaaagtgctgggattacaggtgtgagccaccgtgcccggcccaatttccccatttggtggttcagttacattgcatcattaataaagtctcctgcctcccactaccttgcagggtggggcggggtggggctgagatggtttccgtccaggttctccaagaaagacaagagcttcgccttcccagagtcatgctgagtgtacttcttattgctgacatggggccacgtgaaggtcactactggccttgcctgggcaacatctttccccctgtgattgggaggacgtgattggcacacttaagtcctttagttatcagctgtgatccatcatttgtgacccacagagcccctgattctgccttgtgggtacagtgagcgaggggttgggggcgggggtggaggaaatggacagaagcaaagagtttggagcgttgggtaaaaggaagatggccggcgcgcttttttttatttttatttttatttatttattttttgagacggagtcttgctgtgtcgcccaggctggagtgcagtggctcgatctcggctcactgcaagctctgcctcctgggttcacgccattctcctgcctcagcctccggagtagctgggactacaggcgcccgccaccatgcctggctaatattttgtatttttagtagagatggtgtttcgccattttaaccaggatggtcttgatcccctgacctcgtgatctgcccgcctcggcctcccaaagtgctgggattacaggcatgagccactgcgcccggccggccagcgcggtttctgaagctgctttgggacttggagggttcagagagtgggaactgaatttttttcccctaagagtagagagggagttgcttacacgaaagagctttgattacaacaggagtgatggaggctagacagctggaaggattttccttatggaaagggggtggaaaagccccagaaagcaggcctggtggaaagcttgcacattgcagacctgcagttgctcagcaggaggtttggagctcagctcccggctgggtgaagctctgggagtctgtgtcaacacctagggaagatgagctttgtgtttaccttttaggctaaaaggacttaatgtcggggtgggaaggatcattaacacatcagtgactcagagtccagaaggaaactgttgtccttccttctgtcacgaaggaaactgtcgttggctaagccaagccggaaagtctttgattacacccacaaagaggggcattttcccctggacccaacccagagttctcttcagggactgatagaggagaaagagatgaattcagacaacagggaaataaattagaatttattaggagtcgggtaaaagggtccccaacctataagttttctagttagtcaggcgtgtgagctggcaaccaacccctgccagtttctgcagtccacggggtggtccccaggaggttgaatgaaagaatcagtgtccccgcctcatctggtcccggcctgcacactgtgcctagtaccctcatccctgcacatgtatggcactgactacataagttctagcccagaggcacccagcagtgcctcagtctttttttgttgttgttttttgttttgagacggagtctcactctgttgctcacgctggagtgcagttgcatgatctcagctgactgcaacctctgcctcccgggttcaagtgattctcctgcctcagtctccagagtagctgggattacaggcgcccaccaccacgcccagctaatttttgtatttttactagagacggggtttcaccatattggccagactggtcttgaactcctgacctcaagtgatccacctgccttggcctcccaaagtgctgggattacaggcatgtaaatgcacaaatcttcattatacattttggacaaatggatccttcttccatcctgatatagaacatttctgtctgtccagaaaaatctcccacatccagaggcagccattgttctaatgtttttgtatcttagattgttttaaaacttcttatcagctgggtgtggtggctcacgcctgtaatcccagcactttgagaggctgaggcgggcggatcatgaggtcaggagttcgagaccagcctgaccaacatggtgaaaccccatttctactcaaaatacaaaaattagttgggcgtggtggtaggcgcctgtaatcccagctactctggaggctgaggcaggagaatcgcttgaaccctgtaggcgaaggttttggtgagccgaggtcgcaccactacactctaacctgggtgacagagtgaggctctgtcttaaaataaataaataaaataaaataaaataaaatttcttatcagccgggtgtggtggctcacgcctgtaattccagcactttcggaggccaaggcgggtgaattccgaggtgaggaattcgagaccagctggaccaacatggtgaaaccgagtctctactaaaaatacaaaaaattagtcgagcgtggtattgggagcctgtaatcccagctacttgggaggctgagactggagaattgcttgaacccgggaggtggaggttgtagtgagccgagattgcaccactgcactccaccctgggcaacagtgcgagactctgtctcaattgaaaaaaaaaaaaaaagttctcatcaatggaatcccgttgaagcattttaagcattttttggtgtctggcttctttcacttagatcttgcttttgaggtgcttccttgttgttgcatgtgtccatgttttgttcccctttattattgggtcgtattccaccgcggggatgtaccacagcttgttgatggacacttgggctgctttccgactttggcggtttgttttgttttgttttgtttttgagatggaatctcactctgtcactcaggctggactgcagtggtgcaatctcggctcactgcaacctccgcctcccaggttcaagtgattctcctgccttagcctcccgagtagctgggattacaggcatgagccaccatgcctggccaactttggctattttgaataaaatggtgatgaacattgtcatgcaagtctttgtgtagagcatgcatgttcactgaatccttgcagtagctaataggttggcactgttgttattcccattttacagatgaagacactgaggcacagagggggtgaattcctagtccaaggccgcatgcatagtaaaagctgggggtaggattctaacccaggttcgtctgactgcagcatatgtatttttattccctcactgtagtgtctttgcaccacagctgtttggggccattaagcctagggacaagtgggcatctcctctcaatggcctgtcaattcctaactgcattttagctcacaatagtagttgataataatggtagtgttgataataatggatttgagtcaccacaaaaagattccatcaaacctgcctttatttttatctgtttatttttgagacggagtcttgctctgtcgcccaggttggagtgcagtggcgcgatctcggctcactgcaacctccacctccctggttcacgcgattctcctgcctcagcctcccgagtagctgggattacaggcgcccgccacgttgcctggctaatttttgtattttgagtagagacggggtttcaccatgttggccagactggtctcgaactcctgacctcgtgatccacccgcctcagcctcccaaagtgctgggattgcaggtgtgagccaccgcgcccggcatcaaacctgtctttaaaggacaacagcatttggaggcgtttgagagaaatctctagctagggtcattacagtaactaacagcaagcaaggaagcaaacaaaaagtcttgctacccaaagccctagtcgcctggaaatctcacatagttgtaattcgtcatctcccagagaagccaggcacagaaggcgttactggatatataaaatagtatataaataatacatgtataagaaaccactctgttctctgtagagccaaacagaatagggttttggagagtctgctggttctcgctttgaaagatgttgctaagcaatgttgctaatattatggaaagacagcttccctcccggcttttccactcagcctcagaaactctggaagaggtggaagtggcttcaggagtagcagcagctggggaggtttggtaatcagtgaggcgggggccgggggaccttgggttggagagggactgtgctgtaggccacccagccctcagcctcatccgctcctgattctctgtactgactcctgggcggcctctatgcaaaataacacctcttcctgttcgtcagaaatttcacacacagaaggatccttttgaattttttcactgtgggaaaaattactgtagtcatgcagcttagcaaaaattcaaaaatccataaatgaacttcaaaaaaggaagtattttaaataacttcagtaacccaagtgatatatgaagaacttctttattcctccctctacccactctccataatccctgaacaggaagtcggcagggttctgattgacatcacgtactgcaggccccaccttcatggctctgggtaccagagcgcagggtgcccgccactgagtgggatctgtgggtttcctcagcgtggtttcctttccttggagcttggaaatgccacacaagtcacagagatccgtttccaaaacctgagccagtttagatcctctgcttaatatgacgtctgtggccccaggaaagttgggctgagctgaggtttcccaggcttgtctttgaggcctccgagtcctggcctgcgtttatcacggaacgaccctattgtggtgggatggacctcttgggggctggtcatgggttctgtgaggggattttagaagctgggaggagagtcagtatgttggcagagagttttcctgcatctctctcttttccttctttttttttttttaattagttatttatttatgagatagagtcttgctctgttccccaggctggagtgcagtggcacgatctcagctcactacaacctccgcctctgggctccagcaattctccttcctcagcctcccgagtaactggtattccaagcgcccgccaccacgcctggatgattttcgtatttttagtagagacggggtttcaccatgttggccaggctggtctcgaactcctggcctcaagtgattcgcctgccacggccttccaaagtgttgggattacaggcgtgagccaccgcacccggcccagctctcacttttcaaaaatagaaactgcttcccgacctcagatgacttcaatctttcccttcccccgacgccttcctgcctccctcttccccctcctctgtcttcctcctaagggggcatcccagagacgcaactgtgctgtggcccagcagggggcgctgatgtacctgccaagagtggaggtgtcttagcacaggtgtgagcgttcagctgtgtgcgagcgggcttcagagtgatatcccagagcaggtgtgtgtatgtgtgtaccctcaaaggcagaagagagcgggggtgctggaccgtcctgtccaaggctctgtttataacccttgcgttgtcccaaaggttgtgtggtccatggaatagctgggaccctgcccgtggaggggaggggcaaggcgtttgaagacatctggttttcatcaaaggccccaccctccttgctccatggcccccctcgcccccacccacccccaatcccagcccagaacggtggcagtcattctgcccagcagtggggcgctgggagttggtggctgggtggggcgacgaggtggcgtctgctgcaggctggctctctgacgaggggcacggggattggggctgattcccgctttctcatggatatgtctcctggagccggttcccaggcacagaaggcccttttcttcagggccaggcatgcgtgtctgtctgcctcaacccactggcccctcaggaacgggctgtgcagctgtctgcgctctgttcatgattaacttcgctgtctcccgccccaggcctgattcccacccaggccccctcagcctttggagttcccctggactggaagagagacctgggctggcagctgccgggcactttgttctctgggactgtgagctttggaggctggaacaggccatggaggtcctgagagctgggacgccgtggggcataagttgggtgaggtgagacctgcaggaagaccccttctctgccgtcagagacttctgccgtcctcatttcctgcggtctgcatgtatccagctttctcagcccaccccaaagtgcctcatgaatgtggccttggagcagagtaatgtgaaaattcttccctgtccgttctctttcgaactgtgatttcttcaagaacagtgccttggtttggcgcaggtgtgtcactaacacctaacactgcctgctttttttttttttttttttgagatggagtctcgctctgttgcccaggctggagtgcagtggtgtgatctcggttcactgcaacctctgcctcccgggttcatgccattcccctgcctcagcctcccgagtagctgggattacaggcacccgccaccacgcccggctaattttttgtatttttagtagagacggggtttcaccatgttagccaggatggtctcgatctcctgacctcatgatccgcccgcctcggcctcccaaagtgctgggattacaggcgtgagccactgcgcctggcccgcctgcttttttaaggaaggtacttcaagcttagagcctttgtcaggcaacagtattgaggcagaacttaataaatttatgtttgttttcatggtaggaagggcaagtgataatggattttcatttagggttgcaataacgttttcttttaaaattaagtaaaggcagccgggcgctgtggctcatgcctgtaatcccagcactttgggaggccaagatgggcggatcacgaggtcaggagatcgagaccatcctggctaacacggtgaaaccccgtctctactaaaaatacaaaaaaaactagccgggcatggtggcgggcgcctgtaatcccagctactcgggaggctgaggcaggggaatggcatgaacccggttggcggaagttgcagtgagccaagatcttgccactgcactccagcctgagggatggagcaagactccacctcaaaaaaaaaaaaaaaaaaaaattaagtaaaggccaggcgcgatggctcacacctgtaatcccagaacttgggaggccaaggcaggcggatcacctgaggtcaggagttcgagatcagcctggccaacatggcgaaaccccgtctctactaaaaatacaaaattagcccgatgtggtggcgaatgccggtagtcccagctactcaggaggctgagccaggagaatcgcttgaacccaggaggtggaggttgcagtgagccaagaccgtgccattgcactccagcctgggcgacgagcaaaacaacgtctcaagaaaaaaaaaaaaaaaagtgaaaaagtaagttgatgtaattaaagcaaaattataaacagcagagcagcatgacactaagacaaagaattatgaaggaggtggcgtgtggcccaattgtgggaagctttggctgggctaactgcacacactggctggaaatggtcttcttttgaggtttggagtgtgttaaccctgtttgtttcgggcagggatggtcttccatttttctttcttgccctggtctcttgcataaagctggacatactgtacatgtttaataaatgctggtggaatgggtaagcctagcattgatggttgttccagtctctgctattgatgggttttcttgtgctttggggtcccctctgtggggtgtgggtgtgatgggctgtgggggctggagtgggagttaagaggggaaattgctgtttatgcaccaaaggtggcgagcttgtagggcaggggcagaaggatgggacctctcactgccaggaaaattctacctcttagagactcaggagtcaggggctgagaggttacgattttttgggggacagccttgtgtttgcagtgacactgggcttgtagaaggacttagagggctgggaaccccagaataagagaatgaataatggaacctgcatggtggattttgtgccttcatcatcccaattccctgttgtagttgtttggagaggtggggtctcactatgttgcccaggctggtctagaactcctggtctcaactcaagtgatccacctgcctgcctcggccttccaaagtgctgggattacaggtgtgagccaccctgttacccactgtgcacttgacctgaactagctcccacactctcacctgctgggaaggaggatcaggccttccgttgaggtgcagccttctgtgtgtgggtaaaatacacccaacgctaggatagacctaagccagcgccctcatcaccttccctgccatctaactgaagcggtccatcagctaacctgtgggtcctcgggtgctgtgtgctatagcgcggtgggagagaggggaagagaagctctgggttgcatgctgctgggagctcttcccttttctctaccaaggacactcattttattctttttccagaccaattcttaagtcactactggcatagtacttgcagcctgcctaaccgccaatctcaggagtggggcccgggtcattcaaatctctagctataaaaagatgtccatggctatctatatctctgatcccccacaaccccggcagggagggggtgggggtgggggtggggggcacaaggccagtggtaacggctgcttcataaatagaccaggtgcatttaagaaccaccctggggcttcctcccctccaccccaactccagtgccagcaggaagctgtgggcattggagaggcagggctgaagcctcaggccctcgaattcgtttgcagtccctctcccctctccacccagcatggtcccctccctgcctggattttctgtgtttgcttgaacaccagactattaaaaacaaaacaaaaaacaaaacaacaacaaaaaacaaggcaaattgcctcagggggaacctcttcggccccaaagatggactaattggcttgttctaattcctttcagccccctgcccacttccttttccctagaggggcaaagctgtgagtgatgcttcggaggggtgaggcgggagggggctgggaggctgggcagcacctggaagtggatgagggcgattgtgagcgaggccccgcgccgatggtagggaccaggccacagccctttccccaggagccggcgcgaccttccgaccttccgaccttccgcccttcctttccgaaggagatgaggctcgcgcgcggctggcaggggcgggagggaccacgcgacgagtgcgcagcggccaggcccgggtgggcgcggggagggcggagtggggggcgcccggcccgccaggaggaagcggggtcgccgtgaagttggttattgaacccatgtggagtcaaactcccagggccgggagagccagtgttcgcggggagccgaccccagcccactctgcatcccagctcggcgatccttgcgccgactctgcggggaggcgggggcagaattccgcctcgttcctcccatccgcaagctcccacccggggacccgggcccgggagctgcgagccggggcgggcgccgggctcaggtgccccctgtaagcgctgggcggccgggaggggacggggaccgcgcgcgggcagtttcgtttggacggaggaggacgcgcgtttcctcttggtgcctgttttctctccctctgttttaaaagcagtgacagcatcggggaagtatccggggccgggccggggagggcggcagccgcctctgcctggggagggagctcggggccgccggcgggagtgcgggcggggaccagaaggagcgggcgaggggaggcagggccggggccggggagggcgcctgggagccgggcaggggggtcccgggagcgctgtccgcctcctcctgcgcttcgcccgctccctgtgccccgcgtcctccaccatccgggcggccgaggccggggcgcgggaggcggggccggggcgggtcccggcgcgggcggcgcgtctgagcgggagccgggagccgccggcccgggccgcgccccgagcgagcctcggaaatgcccgcgccgggggagcggacggcggctgccccgcgggccccgaggagacgctgaaggtcgccgggagggaggggagagcgcgcggtcacctgacccccggggcgcacctaggcggggcggggcccatgcgaggcggaggccgggggccggggcgcgggctcaggggccgggtgcggagcgcgcggagccggggctgcggggacgcgggcgggcgaggtcgggcaccgcgggcggcctcgccatgtcccagcccgcggggaggaggcattgccgaaaggcggggatccgcgccgccgtggtgctcatcggactcctgcacaaatcccggaggcagaataaagagaaaaggtaaacccctgcagcgccggccgcttccctccgctctcctgctgcatgccagttttctttggggtggacttttccgatgggtgtttggttccgtgttggttagaaaaaagcctcctctccaggtaccgtcgtgcgaaccgagttcggagcttcgccccggaccctggctggtgcgaggagcctgggcaggaccttggcggaatcggagggccgctgggagggcgcatcggggtggatccctgacggagggaccccaagtccgtcgcccccagaccctttgcagaccgcgaccccgttccccaagcctgcagccgcggatgccattgatccagcccaggcggctccatgcgccggtgttgccatttgcttcctgcaacttggctgagccctcgaggtgcctgcctggccgagatccgcttgctctgcgctcggtgccggcaggcgaggagcaagtttggaggttgttcgctccccacccaccctctcgccccaccgccatagggtgactttgcctcttcgcctttctggcgtttgttctttcgtttgctcctggatattgaaaatagttttctttagctatttcagagacattttggacgacctgtgtggtgggaggtgtggggtttggagtaggcaaaggaggttctgaggaagctttctaggctgcaaccgcagctgcaggtctgacatccaccagaccccaaggagctaccaggcaggtcgttggcacaaagcctccctgttctgctagggtgcatggcagagcctccagcaatggggggaggggagtgcggaagctgactgcccacagagatgttgccgggatcaggatttggggtagcttccagtgaccctgctggatcctagtttccagaggagttttggaatggttaataccgcaccctataagacacgggcagtggaaccagagacacctgggggtgaccagcagcccctggatatgcccacaggtatgaacgtacctggggtggtggtaggcagggaatacgggggactttgagaagctggcatggattgcccttgtggtgggttgtcccccattcctctcgtccccccttcctataatgtgtgtaacaagatgttgcccgctgcacagaatgaatttcccgtgaaaatgacataaggtggttcagcatgaaataacattgagtcacctagtgagaaagttcttcccttttcagttctctgcgaatccttgtgatttctttgaggggaagtttcaggtggatgctagtctgcctttaacacattttaaacacttgctaatcttccttttgtaattaagagagagcagacctccggctcccggtcctctgagtggggaacagttgcctggctagaacttaggttgtttttgtttttgtttcatttatttttaggattctctcctggttaatggccagtggtactgatgtttttccatttgtggtagtgatataaaacatctctttaaacatatgaagtcacaagaattaatctattttatttatttatttatttatttttgaggaggagtctcactctgttagcccaagctggagtacagtggcgccatctcggcccactgcaacctccacctcctgggctcaaacaattctcgggcctcagcctccggagtagctgggactacaagtacccaccaccacgcccagctaattttttgtattttagtagagacgggggtttcaccatgttgcccagggtggtctcaaactcctgagctcaggcgatccacctgcctcggcctctcaaagtgctgggattacaggcatgagccaccgtgcccggctgaagtgaatctatttaatagaaatagtagtaataataatacaagtgttaacaaatatagtggaaatcctgcaagtggtctaggaatggctgatgccagcgacatgtgtgtctagcagaagaagctgccatgggaactctggagtgcaatgttccagggcctgagtccatcttcccctggacttggattcccttctgttttctgcccttcagcattttatctgtagagtggtggtgaacaggtcaactctgagacagcctgggcctgctttgagggctggaatggaaaatgggcttgatagaaaggcagatgcgtgggaccaattcctgattctgagtatagaatgggtggtggttggggggtggagaggaaaagccccctgcacagagagcgagaagttctcttcctggctcatctgttgactgtggtgtgatggtagatttcatctctgggaacctcggtttctgcctcaccacaaagggctgtgaggctcaagtcagatcatgtgagtggagacaggacagaaaggtacaaagtgctgcataaaggtaacgggggtttgatcggaactgttccccctcttctctccctgagcctgtgctcctggtgaccaaggtcagatgtccggtggtgacagccccaccagtagcagtcaagaccagccatgcatgggccaagggggcagccaggtgggtttgagcctgggcagaactagtctgtgggtggtgggggcaggtgcagtgaggcccagggaaggacccggatagggacagggagggattggctgggacccgggtaccccaggcccatggagtcctttatttcttcctgagtgcactgtgctcttaagagcctgcaatgcaggcagacattggtggccttcctagcccctggcttcatcccgttcttctgtcgctccaaccatcctggtggctttggccatggacttaacctacccaaggagaaagagtgattgatttcatcatggtgctaagtgacctttgcttccctctctgtatctggagtttctttgtctctttaagcgtctgaaatgagtgcagcaagcactattgacccttgctctgcaggtgctggtggccacgggaggcctggagcaggctgcagctgccagcctctcttaagcatcccccatactccatgctgggcgttacatttgatgagctcttccttccaccacctctcatcacaaggtggggtcaggctcaggccccttcttctcctcccagaaggcttgatccatccatcgatcttcccagcacctgtaattgacaggcttgtgcagataacactgttggctcttagccttaagggttgaaatggttgtgtgtggcttgcagggaccacccagtggtctttttcatcctcctgctctctccaggccacttggaaatattgcgtattaggggacagggaggtgtgccagccagggtagtcatgagacagatgtcccatatagtcccagaactaggagactcccagctagtcttggtagttcccaagaactgtgctccaggctccaacttcaatttccgttttcgagaaatgggcgtggtgatcatcatgttggacttgaccgtgctctacgggagctgtggggcagcctggaggttatgcctttttctgcccatctttcagggtttctggcacatgggatcctgtaaaagcagtggcgtgtctgagaggggattgggtttgagtatggctcccaggagacacctggatgaagccttcctcagagactgcggtttggaaaccactttgattttcagagcctgcttcttatggatgtgggtagtggggagcttggctccctgagggggaaaacaggcagctttgctgggaaggacggaggccgaggaacacgatcaaaatatgtacgttcttggccgggcgcggcagctcacgcctgtaatcccagcactttgggaggccgaggtgggtggaccacctgaggtcaggagttgaaaaccaccctggccaacatggcaaaaacccatctctactaaaaatgcaaaaagtagctgggtgtggtggcgtgcacctgtaatcccagctattcaggaggctgaggcaggacaactgcttgaacccgggaggctgaggttgcagtgagctgagattgtgccactgcactctagcctgggcaacacagcgagactctgtctcaaaaaaaaggtacgttctgaaagatgtggataaagtcactgtggccttgggtgtgactttctgaactggagagaggtcatttagcataaatgaaaacaagtccacttcttatggtgggtagttattttgagacagctcccatcatggagtttatgaggaggaagatatggattctctcatcatttagcaaattctggcaggctgtcaggggagagctcgaatctgatgaatgtgatccctttgttgtggagtatcatacctggtgggttattcctgggtagaaaaagcctatcgcaattcttgtttaaaaaaattttgttgtgaaaattctcaagcatacacaaaagtagagagaatagggtaacataatacctactttcagccattatcaacttacggccccaatcttgtttcatttatgtaccaatgcactcctccacaagattatttttttgaagtaaatctcaggtactagatcatttcattcttaaatatttcaatttgtatcttaaagataagaattcttggccaggcacggtggctcacgcctgtaatctcagcacgttgggaggccaaggtgggaggatcaccactggagcccaggagttcgagaccagcctgggcaatatagtgagactcatctctacaaaaaaaataaaaaaacatagctgagcatggtggcatgtgcctttggtcccagctactcgggaggctgaggcatgagagttgcttgaacccagaggcagaggttgcagagagctgagatagagccattgcactccagcctgggcaacaggaaaaaaaaagttaagaattcttaaaaaaacccccgtaacactaccgttattataccctctaaattaacagtgatttcttaataccatatttagtcagtatttgaatttccccagttgtctcgtaaaagttttcaaaagtttttttgagtcagaattcaaacaatactatgtgatgggtgatgtgtctcttaatctgtattttcctccaactcttttttttttttttttttttgagacagagtcttgctctgtcacccaggctggagtgcagtggcacgatctcggctcactgcaacctctgcctcctggtttcaagccattctcgggcctcaacctctcaagtagctgggattacaggcgcctgtcactacggccggctaatttttgtatttttagtagagatggggttttaccatgttggccaggctggtctcgaactcctggccttaagtgatccacctaccttggcctcccaaagtgctggaattataggatacatgagccaccctgcttggccctttcaactcttttaaaaaaattttaatttaatttttttggagatgtggtctcactctgccacccagggtggagtgcagtggtatgatcttggcttactgcaacttccgcctcctgggctcgagtgattctcccacctcagcctcccaagtagctgggactacaggtgtccgtcacaacacccagctaatttttgtactttttgtagagatggggtttcgtcatgttgcccaggctggtctcgaactcctggactcaagtgatctgcccacctcggccttccaatgtgttgggattataggtgtgagccgctgtgcatggcccacccaactctttttttcttacaatttatttattgaagaaactggactgtttgtcttgtggagtttcccacagtcaggattttgtggatggcatctcctggtgttatttaacatgttctgctgtcccctgtgttacctgtaagttggtatttagttctagaggcaccatcagatttgttttttgttgttgattgtttgttttttttttttggcaagatcgtgccattagtaattgtgtagttgtctctttttgcgacgttagtcattgttgattgatttgtttctagggtgtgaacctggtatcgggagattacctgtgtcctgccattgcaggcagccccatgagctggctggacatgaggactgtgcctggggtttgtccagaattctggccttgcagtcccagagtcccagagctggaaggggcatgagacaggagccgatccactccctggtcccagaacagatggctgcttgttctctccttaggaggcagctgggtcctgccctttctggaagggcctgtctcctgtcctcttctgtctgatgtttgaatgacacccggtgggctgtcgttgctttaaagaacaaacacctccctttagccagcttcccactattcacttcaccaaaggtctgaggccttagaccattcgagttgaagggacagaatgtgaggtgcaaatgagtttaattcctcctgagccactattttaatctcctgcttggtctcctggcttctagtctcccttatcctctctccttatggtggccagagtggagtttaaaacattcaaatagaaccaggtctctctcctgtggaaagctctccatagactttccattatacttatttatctttttttttttttttttttttttttttgagacagcatcttgctctgtcacccattctggagtgcagtggcgcgatctcagctcactgcagcctccgcctcctgggttcaagcgattctcctgcctcagtctcccaagtagctgggattacaggcacgcactaccgtgcctgggtaatttttttgtattttcagtagagatggggtttcaccatgttggccaggctggtcttgaactcctggcctcaagtgatcctcctacctcagtctcccaaactgttggaattacaggtgtgagtcaccgcgcctggccgactttccgttatactttaaatgaaatcccaactccatagtccggcccacaccccctgcctgcttctgtgacctcacctcccaacttgtcgtcctttcctcctggtgatcaccatgattctgttgcggaggcctcctttccacacttggaacatggcaggctcgcccctgccacaggccctttgcacctgctgtttacagtgagctcattggctggtgcttcctcatccccggactcttcactcacatggcatctctttcaaaaggcctcccctgacgatccaatctaagcagctccctccagtcattactgctttaccctgctgtatttcctccatggtactcctcatttactgatcgtatctagtgtgtgcaataaatagttgattggctgtttcctcccctagaatggaaactgtttcagagcgggaactttgccttctttacctctgggtctccattgcccagaataggagatgctcagtaaatatttgctgagtgaatggatggaagcccaagaggcctcctggctcccctaagtagaacgtgcccattgcctgtttctctggggtcttttttttttttttttgagacagagtctcgcccaggctggagtgcaatggcgtgatctgggttcactgcaacctctgccttccaggttcaagcgattctcctacctcagcctcccaagtagctgggattactggtacccaccaccatgcccagctaatttttgtattttttttggggggggggacggagtctcgctctgtcgcccaggctggagtgcagtggcgcgatcacagctcgctgcaagctccgcctcccaggttcatgccattctcctgcctcagcctgggccctcctcccgtgctgagtagctgggactacaggtgcccgccaccatgcccggctaattttttgtatttttagtagagacggggtttcaccatgttggccaggctgctctcgaactcctgaccccaggtgatccacccaccttggcttcccaaagtgctgggattacagacgtgagcctccatgcctggctccctggggcccttttaatactcagcgccctttcttttgtctgagattggggactgtctcccttctctctcctttctttccttctggaagagattttgtagagaattgcaaatgatcacttgcccgtgtgtagctctgtcattatgccttgcctctgcatagctttgggacccgtagacgtgagagggaccaggctcagccatgaccgtcctgaagctggggccaggagccagggctcttcttgacactgcgttcctaagtcttgggtcctggaactgccgcctgattggcagaggcagcctcccttcatttatgccaaagaggggcagtgggcgtctgaattagtggacagtcgccattagccaatatatatatttttctaaatgcagttttatctctttggagcttgtgtggtgcacagatggctgcttaccaggatgttgccaaatagagggcttgtcaggcctgttcggtgaaatcaacgaaaagcacttctgttcagacgggggctgctgaagggcccaggaagtctctcagtcattttaagcagatgaagcacccccacgccccccaactccctgcccctcaacaaactcagtttctttgcctactgaatccataaaaagtaagtgaggtaggcaagatgatttcaggtggacaagtgctttttattttaatagctactttaagaaatgaatcctggcaagtgatactggttttccatgtatgatagttatataacgttagaaaacccgaatatgggctgtgcacagtggctcacgcctgtaattccagcactttgggaggccaaggcgggcggatcactcaaggctgggagttcgagaccagcctggccaacgtggcgaaaccccgtctctactaaaaataaaaaattagctgggcgtggtggcgtgcgcctgtaatctcaactacttgggaggctgaggcaggagaattgcttgaacttgggaggcagaggttgcagtgagccgagattgcaccactgaactccagcctgggtgacaaagccagactctgtctcaaaaaaaaaaaaaaaaaaaaaaaaagtaaagtcaggcccatcactttagggattccactaagagtgtctgggtggtgcccggggtaccctttatacccatggcagaaggaagaacatggctggtatttcataagctgagatttctgagtgcgggggtcctggttgaaccctgaagagggtctcgaagaatccaagctcatttctaggggtgagtacacttgatcaaccttcccttctccttccaggcagactagtgggaacctggagcagacgctgtgtttattcagtgcccttggagcaagggtggattgaaaaattgtcacttgcttttaagcttatcagttatgaacactgtatttcatgaaggctggagctccagccaagtcctttccagagtcctccagggctgggcagcctggctgggagctggggacgcctctggagacatgtcggccccatgtgtgtcctgagacagctgaccttgccttatggttagtccatttctccaaaggcaggagttgcggggggcctgtggatgagagccacctcctcccttctttctccctcttctgcctttttctctttctctactgtaaagatctttatcagtcacactgaatgctgtgtggcaggatcagggcactgtgatgatacctgttgtcaagagggcttactctggagggtaaagcaacttgtaagaaccccataagggaggcatctctcttgtctttggttgatggatggggctgagttaagagtctagtaagagtggaggtagggccgggcacggtggctcacaccagtaatcccagcgccttgggaggccaaggcaggcggatcacctgaggtcgggagttcgagaccagccaacatggtgaaactccgtctctactaaaaatacaaaaattagccaggcgtggtggtgggtgcctgtaatcccagctactcaggaagctgagacaggagaatcgcttgaacccgggaggcggaggttgcagtgagccgagatcgcgccactgcactccatcctgggccacaagagtgaaactctgtccccctcaaaaaaaaaaaacagtggcggcgggagcccccggttcctcaccgtcttgtcccgtacgtagcagcatgccatcctgactgcggagagtgcagacagcagcagccctgccacctaggagcttgcagtctgaggcggaggtggggagtgggcccctgcagactcctcatatggttaggaagcctgtcctctggaccagacacagtcctaggtgctgaggacgcagcagtgggcagcagagaagcaaagccctgtctggctggagcgtccatgcctgatgggtgttattctgcccacatactttgttttttcctttggagctgatattttagaattggaagattccacattgtgaatctgtttttcagtcttgagaaatcagaagctctgggaacactggctggactggccttccctcattacacctcaacttctagctacctgatcagtacagggctggtagcctcctgctcactgcagcccacctacacctggccacacctttgctacctgccccttccctgaaggacgggacgtacggtgtggggagcaggaggctgggggttgggagctctgggtgtaaccctgtgaacacagaggctgggggttgcatcccagtcctgtgcgtcctttgggacttcttggtcttggcagatccattgcgatgagaaaggaggggtcccggcagcctagcggggcgccctgtgggagctgggctgcagaatggccactgtggatttgccttcaagtattcctcctccctccccctcctgaattacctccaaacaaaatgacagaagttatgggaggctgcgcgtcgcagtacagaaactcaggaataacgtgagaagggacagagacagaaacactcgtggatccccgctctgggcctgcacctgcctggtacttatgcttcacttacctcatttcattctctgcatgacactgatgatcattatcttcattcttcatagaggagaaagctgaggttcaaaagggatggcgtctccaatgtcacctagctcgtataacagagctgggattccaatctgtctggtgccaaattctatgctttttctcccaccaccaattatatggtgaccctggctgaggtacttaacacccccgtgctacagtccaatgaagtagattgaagtgcagctcagagagaccaggtgtcctggtcaagactccaaaactctgttttgggtctcctgttaaggagttaagaactctggcaccctagaacattctggttgtttttaaaggaagggatcagatgggtctctggaacagctgggcttcttttgaatgcttagcctgagctaaggggagggtggagcctagagcagggaaaggtctgtcctgtcaggtgtcagataagctgaaaggtctcctggctgctggcctcactaatgagaacagaaattctcacttctcgatatgaactggaaggtcccggctgcagcctgggttacctgtgccatctgtattttaatagaacgtctattttaataagatctttgagatgcacagacagaaacagcatgtaaatcaataggtcactgaaacaggccatctgaaaacgagatctgcaaatgtgccaggaagggcttttgagagtgacagcaataaatgccccttgtggatggccagaaggtcccccaagggtatggccacatggaggcaggactcagccgtggtgcaagtgatgggaaccgagatgcctggcttccacattgcagctcctctgacccccagcccccttctagaaagggctgccagccctcttggtggcatctgcccctctctttcccctccatgaatgcaaatgcaagctgcagtccctccttaaatggattgtgtcccaaacgttcattcactcattcagttcacctccatcaatatgcgggtgccctccctgcctccagcagcccatgctcctgaagcagagatcaaccatggaatgtgaatccaagacagaagagggaggtgtggagaagaggtgcagggagccctggaggtcagaagaaagggggaccgcccaaggaaggctgcctggagttggtggcatttgaagtgggcctcggggactggacaggatgtctgaagggagagatggagtgggaagcacatccccaaaggagacagtggaagacaaggggccaagataaaaaaacaggggcccgctcagatcccaccttggctgtggtgtggattccctgctggggaacgtgggagatgaggctgttagggcggcctggggccatttcgtgttaggtgttgaatgctggggaaagaagggcaggtcaggctgtgggaggcttccctgctccccgcctcccctagactcagggcagttggtaccccagttagaatacaaaaacagagtcagtcagtgttatacatgaaacaattctgtaacatttgtgttattgtgatttttattaaatagaggtttggggcccaagggcctttgtgttggtgaggcagtagataatacccccaaatgtcccttctgattggtaatttattttatttatttattttattttattattttttgaggcagcatctccctctgtcgccaggctggagtgcagtggtgcgatctcggctcactgcagcctccgcctcccgggttcaagcgattctcctgtctcagcctcccgagtagctgggattacaggtgtccgccaccaggtccggctaatttttatgtttttagtagagatggggtttcaccacgttggccgggctggtctcgaactcctggcctcaagcgatctgcctgtcttggcctcccaaagtgctgggattacaggtgtgagccactgcactcggcctattttattttttattttagagatggagtctcactctgtcacccaggctggagtgcagtggtacaatctcggctcactgcaacctccacctctcaggttcgaatgattcttctgcctcattctcccaagtagctgggattacaggtgcccactgtcatgtctagctaatttttgtatttgtagtagagacggggtttcaccatgttggccaggctggtctcgaactcctggtgtcgtgattcccctcaccttggcctcccaaagtgctgggattacaggtgtgagccaccgtgcctggcctctgattggtcatttagctgatttagtcaagaaacttttggtttgaagtggcaagccccaattcaaattaatgtaaagaaaaaatgaagctttggggtttaggtaactggaaggttcaagggggacggattcaggcctggctggatcgagagctccagtggggtctttggacactggttctttcaccccgtctctaggctgtgccttcctttgggttgccttcgtcctcaggtaccttatccacgaagatggacgatggctgccctgggctgaccttctacccacttagcaataccaacaggaagagcaaatctgtttcccaatcatttcagcagatgtcccagggatggctcaccctggacagaaagtgagtcacatacgcatccctgaactttggccagaggggtgggatacactgattcatgaagtctaggtcttacgcccaccgctggttcccgggatgcagggacttggctgggagtataggagggatgggtcacctaaggaaacctggcatgttgctctcagaagctcaggggatggaagctgggcagtaaaaatgccaacagctgtccactctgctggccctagtggcttagttgatgctgatcttggcacggtcttgtcaacttggctggtggctgcagctgctggtaccctcccagacgcaaggaggcttccttctgccttggctggatgaggtgtgctttcttcttcacggatgcagctcgcgggatccccaagcctttggtagtaaacacacttcctgggctgtcttttctctgagtccattctgaacatcaaagcattcagcctgtgaccgcgctggacctggtctgagaggacagcctggctttgctcggggttggctctcggctctgggattggataatgtgtccccttcctgttttgcttatgctttgtggcacccagctgccctccaccccagcaggtccggattccttgaatacagattgcccctccttccagacgtctggccagtggatgcttttggttacgaggccctggctgagagaagggctggctctctgctatccatccccctggtggagggccaggcccagaggaagtctcagaggtcttagagataggcacctctagatggcaaaaacacgactgcagaagggcagaggagcggcctcaggaaaaacccagggggatatatgatcttgaacgtacatggtgtcgaaactgcggcccttggctttcccatgtgtgaaatgcgactaagactaatgaaagtcttttatgtgtgtaggcaaaaatcttatttagcaattcctctaccaggtgcaatttttttttttttttttttgagatggagtcttgctctgtcacccaggctggagtgcagtggcacgatctcagctcagtgcaagctccacctcccaggttcaagctattctcttgcctcagcctctcgagtagctgggattacaggcatgtgccactacgcctgtctaatttctgtattttttagtagagacagggtctcaccatgttggccaggctggtctcgaactcctgacctcaggtgatctgcctgccttggcctcccaaaattctgggattacaggtgtgagccactgtgcccggccagaacagatagtgtttaattccactttgtctgtgtctgtttgagctgctatcacaaaataccatagactgagtggcttaaaccaacatttacttctcccacttctggaagctggaaagtccaagttcagggtactggcagatggggtgtctcatgagggctcaaatcctgcatcacagacaaccgtcttctcgccatgttctcacatagcgaaggggcaagggagctctcaggggcctcttttccaaggcactgattccattcatgagggcttcactcctcctgacccaatcacctcccaaaggcccctcttcctcataccacggcagtgttagttaggatttcaacacagaaattttaaggggtgcacaaatatagtctatagtctatctactcttatagtgtatagtatgcttatatgaggcacctagaataggcaaattcctaggggcagaaagtagaatagaggttgccaggtgttggagggaaagagaatttttgttgaatgtgtacaaagttcctgttcgggatgatgataaagttctggaaatggacaatggggttagttgtacaacgatgtaaatgccactgaattgcaaacttaaaaaggggtaaaatgatgaaaaaaaaaaaacctaaacaaactttatgcaaaaccttaatatgtacaatagaaaaagcgttcctctggttgaagatggggtgggctggctggtggttctcgcctggtctctgtgaatgctcagctgagttgggaaccaaagtgccttggggactccagggaagcagcagccctcccttccccaacagcccacgttctgaagttgaaggtccctcagggctctgtcctgcccaagctcacacccccactgagggtcacgtgttgctggggaaggtcaggtcccgggagcaggtgcgggcagcgctgggccaccttctgcgagctcccttctcatcctgacatttccctttcctgcagtcttgggctcatggccagccgtcagccagcaccctgtggcgctctcctaggaggctgatctggtgagcggggacgtatagggggtcagcaagtggcccaggtggaacgtggctccgggccacgtgagtggagggcttgagttttgtgaccacaatgtggatgccctctgtgacctgctggcctgctttgagatgggcagcagctactccagggtgcgttgacctgcagagcaggcctcaggggtgggaatctgtatggcccctgaccccggcatggcctcagaaccttcctcagagtgcactctgtgctgctgcttgacaatctttttttttttttttggagatggagtctcgcactgtcacccgggctggaatgcaatggtgcaatctcggctcactgtaacctccctcccaagttcaagtgattctccttgccttagcctcccgagtagctgggattacaggcgcccaccaccacacctggctaatttttttgtatttttagtaaatacggggttttactatgttggccaggctggtctcaaactcttgacctcgtgatctgcctgcctcgtcctcccaaagtgctgggattacaggcatgagccaccgtgccctgcctgacaatctggtttttgaaagaaatgtttattatattttaaaaatccttgttccttgcagaaaatttggaaaacacagaaaagcacaaggattaaaataaaaatcaccttcagtcccacaagggagactgtagagatattaacgtttaatattttttttgtggtcttttttttctatgcaaaagcacaccctttcacgtaatatacttacatctgcatctacgtctgtttctctgtattgtaacaaaggcgggattatactttaggtacagtacattagtcaagacccttggtggcaagtgacagaggcccatcttgaattagccaaacaaaataagggggtttattggctggggtaacccatctgtggaaagggttgggcctcagaaacagctggatccaggggcattggcagaactcctctctgtctcgtcactgtgtctctttgtgttggcttcattctcttgggccatctgtctccatgatgttggatccatggttgtagatccttgtgggctaaacgtttcattttattttattattactattattcttttgagacagagtttcactcttgtcacccaggctggagtgcagtggtgcgatcttggcttactgcaacctccgcctcctgggttcaagtgattctcctgcctctgcttcccaagtagctggaattccaggcatgcgccgccacacctggctaatttttgtatttttaatagagacgaggtttcaccatgttggccaggctggtcttgaactcctgacctcaggtgatccacccacctcggcctcccacagtgctgggattacaggcatgagccactgcgcccagccaagggctaaacattttaatggctgaatttcccccagagaggaaggaaagctcctttccaacagctctggttagatacattccagggaggagttctgattggcctggattgtgtgtccatctcagtccctatgtgcaggggtgggagcggggagccatgattggcccagggagagtcaggggcgcactctggtcagagtggtgttgtgttacaagagtcctgtccagcgggagaggggcagttccctaaagcagaggtggggagcttcattacagaggagggagaggcaacagcggtagggccagcaaacaccatagacaaaagctgctttggagttggtgccagccacgggggtgccagcacggcgtgttgggtgagcacgtggaccctcaccttcatgctgatttcattggggttcaattggtaccatcccatgggcagtacagtttggcagtagctgtctccattatccatgctatcctccttgacccagtgagccacctctggggatctgtcagatgtgcatctttccacacacgtggaatgacgtagaatgaggtcattcacggcaatattatttgaaatagcaaaacactggaaacaaccaaatccctattcatagtgaactggctgcctaaattatttcacattcataccatggactaactacttaaaatagaatgatgaggccaggcgtggtggctcacgcctggaatctcagcgcttttggaggctgaggtgggtgaatcacctgaggccaggaattcgagaccagactagccaacatggtctctactaaaaatacaaaaattagctgggtgtggtgatgcacgcctgtaatcccagctactcgggaggctgaggcaggagaatcgcttgaacccagaaggtggaggttgcagtaagctgagattgcaccattgcactccagcttggatgacagaatgagcctctgtctcaaaaaaaaaaaaaaaaaaaaaggtgaagctgtctgtgtaactgcatcagcctaaaatgagtgacagaaagacgagttctccaaaacaaagagtttctttgggaatagcaaggggttgcaatctgaggtgtccatgctctgatggaccataggcacatccgaggggagtgggacaaggggaagcttttagaggaaaaagaaggtcatataagctgctttgaaacaaagaccgttggttacagaggcttatctcaggagggggcttttgttcttggtggtattggctgctgctaggagagggtcttcacagaagtggcttaactggaaagttccagcagggacagcccttcccggcagtttctgttacccgcagtcatgcgcgagggccttttcttcatggcttccttttgttagggtttgatgtaagccactccgtttttgatactgacaactttcacacttgatggaaagttctccctagatttttttttttacaaagacaaagttttgttctgtcacccaggctagagtgcagtggtgtgaacactgcagctttgacctcctgggctcaagggatcctcctgcctcagcctcctcacaggtgcacactaccatgcctggcaaagtttttgtagagactggatcccactttgttgcccaggcctggtctcaaactcttgggctcaagcgatcctccaacctcagcctcccaaaagtgggactctagtaaaaatacaaaaattagctgggtgcggtggtgggtgtctgtaatcccagctgcttgggaggctgaggcatgagaatcgcttgaacccgaggggcggaggttgcagtgagctgagattgcgccaccgcactccagcctaggggacagactgagactttgtctgaaaaaaaaaaaaacggaaaatagtacttcatctttgtgttgtgttggcttgtatttgcataaagaagctgcagtaggctgggtgcagtggctcatgtctgtaatcccagcactttgggaggctgaggtgggcagattgcttgagctcaggagttcgagaccagcctgggcaacatggtgaaaccctatctctaccaaaaatacaaaaaaaaaaaaaaaaaaaattagccggttggggcggggcatgcctgtggttccagctacttgggaggctgaggtgggaggatcgcctgagcccaggaggcggaggttgcaatgagctgagattttgccactgcactccagccagggtaatagaatgagaccctgtctcaaaaaaaaaaaaaaaaaaaaaaaaaaaaaaaaaaaaagcagcagcagctgcagaaaggtgtgtaaagatcatttcacaggctgaataagtggacagattgggacaaggataagacaaaataggccttctaataattttggcgtttgagccctgctaatgtattcctcattcaaaactcaacagaccagtttccttttggggtgatgaaaaagttatggaattagtggtggtggttacataacatcgtgaatgtacttaatgctactgaattgtatactttattatttatttatttatttatttttgagatggagttccagtcttgttgctcaggctggagtgcagtggcgcgatctcagctcactgcaacctccgcctcctgggtacaagtgattctcctgcctcagcctcccgagtagctgggattacaggcatgcgccaccacgcctggctaattctgtatttttggtagagacgcggtgggggggggcgggtttcaccatgttggccaggctggtcttgaactcccgacctcaggtgatccacccgtctcagcctcccaaagtgctgggattacaggcatgagccactgcacctggcctggctttctcattttctagctctctgactgtggacaagttacctgatttctcaaagaatcagtttctcatttgtaaagtgtggataataaaagagtctgtattctgcagattaaataagaggcataagattgagctctgtgcctggggaacaatgggtacaccctccctcccctttctcccctctgccaactggacatttgcatttaaatggggactcttgaagactaaaaacactctaaactccaagggaggaatggttggaatttcagaaaaattcatagctcttatctagggtaaggtctgggtcttttcctgtggagagttaagcttttaggtcctcctcacctgaggccccgggctgacggaggcattggaagcttgtaaaagtcagggctgagatgacctatctacaaagagcatttctggcaccctcatttcaagcaggtattcagtgtatgtgcataagaatgacgtggagaggaaaggagaaagaggtggaaaagggggagggagaaaggacccgatcaaggtcaacagcctgaaccagtcagaggcctcagcctggggctggattctggaggaaatgagacggtaggtgctacatcacccatggaaacaaaggagcagccacccagccaggaaaagccccaaacccttgaaaccccacgtttagcttgcgagctctctgctctcctgtatagcagaagttcttgaagttctgcctctgcttctcaccaatgcccagcagccactctggttctggacccggtggtcaccctctgccctcagtttggcatccctcacacagcctcatactcgcttctcaaaaggctgtctccattttgctcatgactgtcgacctagagaaagaaacagagagaaaattaatatagagagtttgctcgggccaaagttgaggacagctgccagggacgcttcaaaattaccttggggacggcgcccttcgacatttgttaaaagcaagtttttgttttgttttgtttcttgagatgtagccttgctcttgacgcccaggctagagtgcaatggtgcgatctcggctcactgcaacccctgcctcccgggttcaagcaattctcctgcctcagtctccggagtagctgagattacaggcgtgcaccaccacgcctggtgaatttttgtgtttttagtagagatgggatcttgccatgttggccaggctggtctcgaactcctgacctcaggtggtctgcctgcctcggcctcccaaagtgctgggattacaggcatgagccactgcacccggccacaagcaggtttgtaaaggcaaaggggacagggagtggggtgatatgaagttgttggatgggcattctaactggttacaggggtaacattggctgtgcgttgttgagctctagggtctgagtgatggcgtccagtgtatggctatgtggcatcagttagtttagggctcatgtagcaagtggcttcaagaagtgattacttagctcatggagcgggtgagagggaccgctgttgcttttcagtgcctctctgggcctgaccgtgacaggaggattgcatttctcagattcaacattgcctttttttctcacgacagtgaatgtcttgtcctcctggtttccctccgtctcgccgcctgtctgtctcatcctcctcctctgctggccttccacctgctgtcgtgcctgggccccttcctcttctctgtctcccttggtgatctccgcttggacatccgatagttcttccaagctgaacgtgtcccaactccaggtcttcattcttgccccgccaaagtcatccttcctgtagccttccccagcttgacttctctgcattgttttttgtttgtttgtttgtttttttttttgagatggaatctggctctgtcgcccaggctggagtgcaatgatgcgatctcggctcaccacaatctccgccccccgggttcacgccattctcctgcctcagcctcccgagtggctgggactacaggcacccgcccccacgcccggctaattttttgtatttttagtagagacggggtttcaccgtgttagccaggatggtcttgatctcctgaccttgtgagctgcctgcctcggcctctcaaagtgctgggattacaggcatgagccaccgcgcctggctacattgtttttatagatgaaaagagtccaactctgtaaaatattcgaagagatttattctgagccaaataagagtgaccaatgtagccccaggagatcccgagaacaagtgcccaaggtggttgggctacaggtggttttatacattttagggagacgtgagacatcagtccatccatgtaagatgtccattggtttggtctggaaggttaggacaaccagaatcgggggttttggagggtccataggtggattcaaagattttctgattggcagttcattgagtgagtttatctaaagacctggaatccatagaaaggaatgtcagggttaagataagcagccgtggagaccaaggtttcatcatgcgggtgacgcctccaggtagcaggtttccgagagatgagatagcaaatgtttcttatagacctggagtctgttctatgagtctttaggtccctgtgctgatgttgatgctggtcagctggggctgaattccaaaggcgaggagagcataaggaggcatgtccgaccaccccttcccatcatggcctgaaccagtttttctggctaactttggaatgcccttggctgaggggaagggtcatcagttggttgggggccttagaatgttatttttggtttacgttcttttttttttttttttttcttgagacggagttttgctctgttgccaggctggagtgcagtggcgtgatcttggctcaccgcaacctccacctcccgggttcaagcgattctcctgcctcagcctcccgagtagctgggactacaggcatgcgctgccacacccagctaatttttgtatttttagtagagacggggtttctccatgttgctcaggctggtctcgaactcctgacctcaggtgatgcacccgcctcagcctcccaaagtgctggaattacaggcgtgagccactgtgcccagccttggtttatgttcttattccccatgtccacttgtcagcatgctctgttgctgcctccatgatgcatccagagacggatcatatctcccatctccaccacggtcttttgaggccagtccatcatcagctgtcacctggattattgaggaacctttcagccagcctccctgcggccatgtttttccccttacagtccgtcctccgtaaggcagccagagtgatcctgtgaaactgtgggacacatcacatctctgctctgctcacaaatctccctgcctggccgggtgtggtggctcacacctgtaatcccagcactttgggaggccaaagcgcgtggatcacctgaggtcaggagttcaagaccagcctggccaacatggtgaaaccccatctctactaaaaaaacacaaaaaattaactgggtatggtggcgggcacctgtaatcccagctattcaggaggctgaggcatgaggattgcttgaacctgggaggtggaggttgcagtgaactgagattgcgccactgtacttcagcctgggtgacagagaattaaatgaatgcctgaaatttggttttagtgaatgaatgcttgaaatttggttctcatggtgagggtgacaggaagccatttcaaggccttagatagggggctcatatgatcaggttgacattttggaaggtccctgtagctcctgggggagacagtttgggagtgggaccagagtgggatcctggagattggctgggaaggtgtcagtggcttggagatgatggtggagggggattggggtgcattgactgagctgagagacgtgtaggaggcagagtgaaaggcttgttgttagagctgtgcttaatacactttcatggacacacgcgttacctggcatcctctggaaatgcagatgcgtaaaggtgggtctgggctgggtcctggagtctgcttttgggtgacattatgttgccggccggggacacacttagagtagcaaggggttgggtgtcaggcataagggaaggggagtcaggaacacattgtgcctttaattgcaagagaacctaggaggaggagcaggttgggggaaacgatgaggtcatttagggacacattgggttcgaggtgcctgtgagacccccccggggatgtggcatctggagctcagcccaggctggcggtggaaaatgaggagtcgtccttgggttggtgggtgcagccttggtgtgggtgaggctgagtgggagagggcatagggagggtggtcagagctgcggaagcccctgtctgtatgccgtatcgctgactcgaaaggtgcatcacctaggcaagggcgttggttaggtggtctaaccaccaccccttccgatcatggcttaggtggtctaaccaacacccttgatttagggcaggggtttctctcgctggttcctgctggttcatcagcctaactaaggaagggagcaggagcctctcccctgaaggaggcggcagcctgtgggcccatgagggaagccagccaaccctggctctctgcttctgatgcacctgtcccagtgggcctgtccggaagcatttgggtatccctgctgcccaggagccccacggtggactcaggcaaacctgggccccagagcccacttagccacttggtagctgcgtgagcacgcgcaaggtgctgcagcttgctgggccccggttttctcatccgtgtgatggggtaataatagtgccctcttcccgtgacggttgtgacgatcagtgagatggggtgtgtgacatgctgagcccggaggccggcgctggccagtgctcagtgaggttctgttatctctggagggtgtggcaaggtcaggatggacactggccttgcctcctccttcctgccctacccactgcatgcacctggcttggccccacctccaagcccttctttttttttttttttgagacagagtcttgctcttgtcactcagggtggagtgcagtggcgtgatctcagctcactgcaacctctgcctccccggttcaagtgattttcctgcctcggcctcccaagtatctagttttacaggcacccgccaccataactggctaatttttgtaaacttagtagagctggggtttcaccatgttggccaggctggtttcgaactactgacctcaagtgatccacccgcctcggcctccccaagtgttgggattacaggcgtgagccactgcgcccggccacaaagcccttcttacattgaaagtcccttggctgggcgtggcagctcatgcctgtcatcgcagcactttgagaggccaaggcgggcagatcacgagatcaggagttcaagaccagcctggccagcatggtgaaaccccgtctctactaaaaatacaaaaaatagctgggtatggtggtcggcgcctgtaatcccagctactcaggaggctgagacaggagaattgtttgaacccgggaggcagaggttgcagtgagctgagatcgcaccatggcactccagcctgggcgacagggcgagactccatctcaaaaaaaaaaaaaagaaagtccctgcttcctgttgggtcctcctccttgccttgagccctctccctccattcagatccatccccactgatgtctcctgctcgtctcttgtccattacttttttcctcctgagccctactgtaatgcttggagagtttggggggctggtgagggcaggatcatctgctgtctgttcatgtctcccaagagaccgcagggtccttcaggctgggtgggtgctgaatatccaatggggaccaggtaggcctgattcctgccctcctggagctcaccgtccagcgggaaggacaggcatcagactgatcgtgacaactgaggggctgggagcagggggctgggagcagggtgccgtggtggcagagagcacggggactgatggatgacatcggaagggagggacattcaggcagagacctggaggatgattaggatacaggaagacgaaggcttgggggggatgggagtgtgggtgagagaagggtctagacagagggagtagtgtgagtgggagggctcatcacaggaacccacaggctgtgtagaccggttggggcaggtgtggagaggaagtgagaggggtgggagatgaggctgggtggggccgttgggacaagggggtgcggagagttgggtttgagccacatggtcatgggagccatggaaggaggacagaataatccacctcacatttatttttcaccttcttcttttttttttttttttattgtggtaaaatacacatcacacacagtgtctcacttgaatcattttaaagtatacggttccgtggcatcaagtcctgttcacagtgttttgggatcctcactaccattctccagaccatgttcatcatccagatggaaactgtatccattagccgtcactcccacccccgcctcccccatcccgaagcaactaccatctactttctgtctctatggatttgcctcttctgagcatttcataatgcaggttgggtgtgtcttatctgacatgcttgggaccagatttcatattttttttggattttgctgtatttccattgtacttagtggttcaacatccctactctgaaaattcaaaatctgaaatgtgccgaggtcaggcacggtggctcacgcctggaatcccagcactttgggaggccgaggcgggtggatcatttgaggtcaggagttcgagaccagcctgtccaacatggtgaagccccatctctactaaaaatacaaaaattagccatgtgtggtgatacatgtctgtaacccagcactttgggaggccgaggcaggtggctcatttgtggtcaggagttcaagaccagcctggccaacatggtgaagccccatctctactaaaaatgcaaaaattagctgggcatggtggtgcacgcctgtaatcccagctactcgggaggctgaggcaggaggattgcttgaacctgggaggcagaggctggagtgagccgagatcgtgccactgcactccagcctgggggacagagtgagactctgcctcaaaaaaaaaaaaaagaaaaaatgtgccagtgagcatttcctttgagcaccatgttggcactgaaaaagtttaggatttgggagcattttggatttcagctttttggatttgggatgctcagtgtgtagatggaatcacacagtaggtggtggtctgtgtgtggcttcttccacttagccagcattcatccacattgtagcacgaatccgtaacggcacttcattccttttcagggttgaataatgttcctttgtgttggtgtgccacgttttgtttatccactcattcgttcatggacatttgtgtttctttcacctgtgatcattgtgaatagtgttgctatgaacacttgtgtacatgtttttgtttggaaatgttttctggagtggaattgctgggtcatatggtaattgtttgtgtaactttttgaggagcgtccacacttttcaacaatgggctacagtttctctgcattcttgataacgtttattgttatctgtttttttgcttttttctttttttctcgatgatggccatcctagtgggtgtgatctgcttttttttatttgtttgtttttgagacggagtctcgctatgtcgcccaagctggagtgcagtggcgcaatctcggctcactgcaacctctgtctcccgggttcacgccattctcctgcctcagcctcccgagtagctgggactacaggtgcctgccaccacgcctggctaattttttgtatttttagtagaggtggggtttcactgtgttagccaggatggcctcgatctcctgacctcgtgatccacttgcctcagtttctcaaagtgctgggattacaggcatgagccactgtgcctggcctttttttttttttttttttaattttgagatgtagtctcactcttttgcccaggctagagtgcagtggtgcgttcttggctcactgcagcctccacctcctgggttcaagcaattctcctgcctcagcctcctgagtagctgggattacaggtgtgcaccaccacgcccagctaatttttttttttttttggcatagagtcttactcttgtcccccagggtggagtgcagtggcacaatctcaactcactgcagcctccacctcccaggttcaagtgattctcctgccttggcctcccaagtagctggggttacaggcacgcgccaccacgcccggctaatttttgcatttttagtagagacggggtttcgccacgttggccaggctggtctccatctcttgacgtcatgatccacccaccctggcctcccaaagtgctgggattacaggcatgcgccaccacgcctggctaatttttgcatttttagtagagatggggtttcgccacgttggccaggatggttgattggcttttcatttcagcatggtccctgtgtctccttcctggagaatgggttgctcagtgcagtggctggagatgggctgggatgcgggtgccgttgtctaggtgagagatcatgcttcggggtggagtgatggaacagttagggaggtggcgaggactttgtgataccatggaggccacgggtgagggaagtagggactcaaacgtgactgattcgtgtcatgtccccagcggctagcgctatgctggcacaccgtcggtgctttacagatactcgcggaatgaatgtcagatccccaagaagaaatgggaacctggaagttcttggtgctctttctgaaggcccctcccctgtgggccccctgatggtcctgggcttgggcagcccctcttctgagggaggctgcggggttgtcttggtcggggttatgtgaaggtggggtgggcagcagagcagcttccaggggctacctccatcttctctgtgttcaagctccacagcccccaggagaccacgtgggtggtgctggggagctggagaggatggtcttttgggaggggcgcatttgagggctgcactgtgagctctgagggggcagcaaagcctttcctgagctccccaaggctggtgtgaaagcactttctgtctgcaggtcggtgtcccagcccagggacgctcctccattcttggcatttctctcggggttctgggagggtccagaaaggcctcgcccagcctttgcggttccctttcctctggcttccactccacgtgctgccctgctctcggcaccttccccagccgggcagccttttaacggatggattttggccttgatggagagggaagcgccttcgatctaaaagcttccaaaagcttctctctccacccttctgtctttcctctctctctccctcattttctcctctcctgttttctttttttttcctcacctgtgttctgtaaatctgtaaaacaaacacactttaaaaatgtcacttgtctcttctatctgcggcctagagtggggtaaagctgttacctcccttgggagtcggcttttgagctctgggcatgagtcagccctgttcctgatggccgcaggatgattggcagagaatcccagggtggctgcctcatggcctggggcctcgccagctggggcttcaaggctgtgacccagatagggaggtgggtgaccctttctgcctattccctgctcaccttctggtccagggagggacccagaatggacaggcaggggcctaggactttagccaaccttcgagcaacagcaaaaactctagacaggcccctgtggttacccacgtcagtgtgaactgtgggctcctgtcagccttcacctccgcctcctctctctccagggagagcaggtgtgtcctttctgggccagtcgggaatctcttgttcagcactgttggaggtgtgggggatgcatggggcacagggtgtggtctccagaaacttctagtgtgcattgcaagtgagaagcatcctcttacgccaggactctgattgggcagggaatactcagcgtactcaattccaggctttgctatggggctgagagaacgctcgctgtggggtgcagtggggctgcagtggccctttcattcattctttgcttcttcaatcactccttcactctgtatgtgaatgggcgagacgggtcggacacagctcttggagtcagagttcttgagttgttttttttttttttttttgagacagaatctcgctctgttgcccaggctggagtgcagtggtgcagtctcggctcactgtaaccttcgcctccccggttcaagcgattctcctgcctcagcctcccaagtagctgggactacaggcgtgcaccactatgcctggctaatatttgtatttttagtggaaaagggggtttcaccatgttgcccaggctggtctcaaactcctgacctcaggtgatccgcctgcctcggcctcccaaaatcctgggattacaggtgtgagccactgcgcccagcctagcgttcttgaatttgaattctgtttcttccactgactagctgtgttcctgttagcaagtcattcagcctttcccaagcctcagccgactcatctatatataagatgaaaacatcactccttgtcctgatcttcctcacggaactgtgcttggcagaggaagtaatcatacgcgtcacagcaaattatgacacaagtgtaaagtctttctgcgaacagatactttttgagggccttcagggtaggaatgctgcccttgaccctgtgggctacatggagatggtcaagacagtccctgtcctcatagccgttacggcctggcaggccaaataggcacatttcttttatttctttctttttttttttttttttttttttgagatggagtctcgctctgtcgcccaggctggagtacagtggcacgatctcggctcactgcaagctccgcctcccaggttcaagtgattcttctgcctcagcctccccagtagttggattacaggcacccgccaccacgcctgactaattttttgtatttctggtagagatggggtttccccatgttggccaggctggtctcgaactcctgacctcgtgatccacccgcctcggcctcccaaagtgctgggattacaggcgtgagccaccgcgcccggcagatagacacacgtcttggcagatccggctggaaggttctcagcatgctttctcatggggcactgatgcaacagagcccctgagcacctcagttcatccagcacatagtccctgcatgtccacaggagccaggagctgttcagaggctagatcggtgggcttggagtacgttggaggtgagcaatggtgaggcccggctacccccaccaagtctcgcagctgcaaccagctcctccagcaggaagagcctctgtgttctctccctttggcagctcctcgcatcccaccacgtacactcagttctgggtctaggggctgaagcagtgccttttcacttgggtgattttctggctggcctaggaatggcctcttcctgtcaccatttggttgagccaactggggcagggagaggatctgggaaggggagacagagatcctgaagagggccccttaattctcagtggctccagctgcctggcgaggccaccctcatgcctcctggggagaatatcgccgtgtctgtggatagtcccttccagcattattgacattgatgcatcatcttgtcacttaggtgaccagggcagctggaaatgattcggcaggaaggccgaaatgccggccttttctcagccctgattccctgtggcaggtgctgggtttgccccctggggcctcctgctctgggttgagatgtcgcatgagaagagcagaaggcagatgcggcagggccttccccacaccccgtccactttactagatgcctctggactctgaattttttttcccaatgaatatgtatttatgtgtgtgtgtgtgtgtgtgtgtgtgtatatatatatttttttttttttttttttgagccggagtctcgctgtgtcccccaggctggagtgcagtggtgcgatctcagctcactgcaacctccgcctcccagatttaagcgattcttttgcctcagcctctcgagtagctggtactacaggcacacgccaccacgcccagctaatttttgtatttttagtagagatgaggttccaccacgttatccaggctggtctcgaacttctgacctcaggtgatccacctgtcctggcctcccaaagtactgggattacaggtgtgagccaccgtgcccggccatatgtatttatatttacaataaaaatttaaaaatcagaaaacagaatgatagtcagtggtgccctttgtaacaatccaagaatgggttattggtatttaacaggatacttttgtaggcatttagcgaagcaaaaataactttctcttagaaaaacataacgcctgtctcaggcgctttcccacgcagctttgcttgtggacttcaggtttgtctaggtgggtgtttgcacggcccttgaactacccattccccagcagacggcttgatgaatgagcccagtggctcagcacaccagagcggcaggggtcggggagtgggactgaggccgagggatccaaagcagcagtgcaacaggcaagtcatccagggattgcccctccgggtccctcagaatcccagctgtgccacttacttgctgcaggaccttccagaaatcacttaccgtctctgagcctcagtttcttcatctgcaaaatgggagaataattctgtatctaccacataggggtgttgaaaagattaaatgaaataacgtacataaagagtttagtatagtgctaagcaaatattagctgatatgatgatgatgacgaataatagtttttttttttttggagacaggatctcgctctgttgctcaggctggagtgcagtggcgcattgcactctgcctcctaggtccaagcgattctagtgcctcagcctcccgagtagctgggactacaggcatgcaccaacacgctcagctaatttttgtatttttagtagagacggggtttccccatattgcccaggctggtcttgaattcctggcctcaagggatctgcctgccttggcttcccaaagtgctactattacaggcatgagccaccgtacctggctgatgatgaagaatacttaccttttttttttttttaagatggagtttcgctcttgttgtccaagctggagtgcaatggcgtgatctcggctcactacaacctccacctcctgggttcaagcgattttcctgccttagcctcccgagtagctgggattacaggcacacgccactgcgcccagctaattttttgtatttttagtagaaatgggtttcaccatgttagccaggctggtctcgaactcctgacctaaggtgatctgcctgcctcagcctcccaaagtgctgggattacaggcgtgagccaccgcgcttggtttttttgttttttttttttgaaatggagtctctctctattgcccaggttggagtgcagtgatgcaatctcagctcactgcaacctatgcctcccgggttcaagcaatccccctgcctcagcctcccgagtacctgggactacaggtgcataccaccacactggcaaatctttgtacttttagtagagaaggggtttcaccatgttgggcaggctggtcttgaactcctgacctcaggtgatcctcctgcctcggcctcccaaagtgctgggattacaagtgtgaaccgctgcgcctggcctaactattatctctactatctgtgtccagacaagaagcccgaggccaggagcagaatcaatccccagggaatagcaggagcttggtaacagaccaaataggtggggaagtggttaactctgtctcagagtttttaaaaattttgcttttatcatgatcatgatttctaattgacacataataattatacctattttgggggtacagtgtgatattttgatatgtgtatacaatgtgtaatcatcaaatcaaggtaattagcatatctgtcacctcaaacgttgatcatttctttgtattgggaacgttcaaaatctgctcttctggctatttgaaaatatacaataaattgttaattatggtcaccctacaaggctacagaatactagaaatgattcctcctttcggtacttttgtatccctgccaacctctccctaacccctctctttcctgcccttctcagcctctgctgaccactattctgctttctacttctgtgagatcaacttttttagcttctacgtttgcatgagaacccacagtgtgtgtgtttctgtgcctggcttatttcacttcccataatgtcctccagttttatgcatgtcgccacgaatgacgggatttggttctttttttatggctggatagtatcgtgcatatataccaccttttctttttctttttttttttttttttggagacggagtcttgctttgtcaccaggctggagcgtattggtgcgatctcagcttgctgcaacctccgcctcccgggttcaagtgattctccggcctcagcctcccaagtagttgggactacagtgtacaccaccacgcccagctaattttttttttttttttttgtattttagcagaggtggggtttcaccatgttgcccaggctggtcttgaactcctgagctcaggcgatctgcccgccttggcctcccaaagtgtaggattacaggtgtgagccaccgtgcctggcctataccaccttttctttgtacattcttctgtttatagactcaggttcattccacacctgggctgttgtgagcagtaaacacaggagtgcagatggctcttcaacaggctgactgcctttccctcagatatgtaccctgcagtgggatcgctgggtcatgtggttgttctgtttctagtgttttgaggaccctccgtgctgtgttccatagtggctgtgctcacttacgttcccaccaatcgtgtctcaggctcttgagcagggagatgaggtcaaccaaagcactgatgaaccaaattgcagtggtgatgagccgggtgccagctcagccgagtcctccacctcttggggtctatgagctccccatgtgttacacatttttgagttcattcagtgccaggccctgtgctggggcaggccagtggtcagggtgcgtgttagagcccagccagaggcctctgttctctctgggtcagaggtaggcttggccgggggagtgagtttctgctcatcacgtggagatcttgatcacccagtggagctcccggcggctgagccctctttctgaactttccagccgtgaaatactgcaggggccatggccagattccagtatgcccctggaggctcttgcaggtatcttgtcctttcttttctaatgtcccagagaaagaggccagcactgggaggaggcaggaggtttgatcgatctgcgctggattttttttttttttttttttgagatggagtctcactctgtcgcccaggctggagtgcagtggcacgatctcagatcattgcaacctctgcctcccgggttcaagtgattctcctgcctcagcctccagagtagctgggactacaggcgcacgccaccacgcctggctaatttttatgtgtgtgtatatatatatatatatatatatatatttttttttttttttgtagagatgggttttccccattttggccaggtgggtcttgaactcctgacctcaagtgatccgcccgctttggcctcccaaagtgctgggattacaggtgtgagcccccgcactggcctgcgctgtgttctgtaggttgggttagagcatgctgttgagatgagatcccagccctggtccctgggagccaaatcactgatgcttggttgcatggccatgggtggaaccccttgttctggacactcgtcttccaggaatgtaccacggtcacaagcaagaaaggggaggaacgaggatgggccaggtgccctgtctcagtgctggaaaacagcttcatgcatttgtctttctaatgagtgagaataacattattatagtaattgaatagaccaggcagatttaccctgaaatgctgtagtctgtccccattgaaactgttatttagtttgaaccaatgatggaagctcctaatccattatgtcaccaagtaatcttattcagaagagttaagacttaagacacagtcttagagcggagtggagcagtggcttagctggaaggccggttggctctgtgatagggaaactttcagtgctcacagactgctgggggatttcttagcatggatggtttaacacgcctctgtgctgggcactgtgagacggggctccttttcttcttgggcttgccgggaattcagccaacacatgggaccccttattacacagtgtatcctcccagtagcaccagtttttggtccaattcaatggtcagtgtttactttttttttttttttttgagacagagtcttgctctgtcacccaggctggagtgcagtggcgcaatcttggctcactgcaagctccgcctcctgggttcacaccattctcctgtctcagcctcccgagtagctgggaccacaggcgcccgccaccacgcccggctaattttttgtgtttttagtagagacggggtttcactgtgttagtcaggatggtctcgatctcctgacctctagtgatctgcccacctcggcctcccaaagtgctgggattacaggcttgagccaccacgcccgaccaatgtttactttttatgactgtgtaaatgttattcattgttatgtgagagggtaccataattatgttttctttcttgtataacttttcatgtttcttggagttaatgattaactcctgtttctgccattagctttgttttctatggacctatctttctttttcttttttttttaatttttgagacagggtctcactctgtcacccaggctggagtgcagtgccacattcatggcttactacagtcttgacctccagggttcaagcgatccccctacctcagcttcccaaatagctgggaccatgggtgcttgccaccatgcctggctaatttttgtggagagacatggtctcactatattgcccaaactggtctcaaactcctgagctcaaccaatcctcccgccttggcctcccaaagtactgtaattacaggtgagagccactgtacctggcctatttttctacttttatttttttctaccacaattactttaatagatggcccctccctaccctcccccatctccgccaagcttgcatccatcagataacctgtcaattccattctttcccccaggagatctcacttccagagcccccccatcctctagtgatagtatcctcccaagaaagggtgcaagggtgtgaatttttttgagctcttgcatatttcagaatgtctttattggttgatagtttgcctgggtgtgaaattttaggttgaaaataattttctttgagaattttgagagttataacatcattgcctactagattccagagttgctgttgaaaagtctgatgatatgcagattcatatttcttttcttttttttttttttttttttttttttgagacagagtttcactctcgtctcccaggctggagtgtaatgatgtgatctcggctcactgcaacctctgcctcctcggttcaagcgattctcctgcttcagcctcccaagtagctgggactacagtcatgtgccaccatgcccggctaatttttgtatttttagtagagacggggtttcactatgttggccaggctggtctcggactcctgacctcaggtgatctgcctgtctcgacctcccaaagtgctgggatgacaggcgtgagccaccgcacccggcccagattcctatttctctgtatatggtatgtatttatattttctctctggtgtcactgagaatttttcatttgcccaggtgttctgaaatttcctgacagtgtttgggatggatcttgtgtctttactgtgctgtgtacttggtggacccagagactcaggaccttcagttctggaagatgttcttgtactatttccctgctaatctttctgttatggtgagacaacagccattttattatgctcaagttctgtgggtgaggaattcagctagggcgtgttggagatgatggcttctctctgctttcacaacgtctggggacctcatcttgggtggctcagatggctggagatgactgcgacggtccactggggctgtatgtccgggagctgggctgtgttctcatagcatctactggagctgagatgcccaaggtggtttcttcatgtgcatggactgggatgtttggagcatctgggcatctctctccatgtagcctctccatgttcccagctgcagcattgacagtctcagtcaggcctttcacgtgcaggcttgctttctctggagcaaatgttcctagaggtagaggtggaagctgtcctgtgactcattcctgaaagtgaggtaatgttacgtctgtctcattctgttggtcaagactgagtcacagggccagcccagattcaagaggggagcacacaaagccatcagcaccaagagatgccagctttggataccagctgccagctcccctcccctttctctttctgggaactttcttggtcggctatttgatcttttttctcttccctcttttgttttctgtatctttatgtttttgttctactttttgggagatttcctcaacttagtcttttcatcatatttctttttctctttttcttttttctttttttttgagatggagttttgctcttgttgcacaggctggagtgtagtagcgtgatcttggctcactgcaacctctgcctcccgggttcaagtgattctcctgcctcagcctcccaactagctgggattacaggcacccgccaccagctactagcccggctagtttttttattttttatttttagtagagacgtggtttctccatgttggccaggctggtctcgaactcctgacctcaggtgatctgcctgcctcagtctcccaaagtgctgggattacaggcgtgagccaccgcacccagcccccttactgttattttaatgggcttcagaagaagtgggataataaatgcgtgtggtcagtctgacaggttcatcctggaagtctcaacaggcttcagaatatctctatttatatctcctaaaggaagtgagggtacatagttatcactgctgaaacatgattttttattgtgataaatgttatacatccacactgaatgaatcataagatgaatgcgcctttcctcgccatccaggtgaagggcgtttacgggctgggaaaatgctgatagcccacaccttgtgactcccggcttttgtgagtggtttctgaagctgccggaggccgtgaccttgtgcgctggctgcctctgctctgaccatgacgctgctccccccatggaggccaggcagtgccaggcagagccgctgactgcgcccgggaggggaactgctctgtcggcagtttctgagtgacggagtgcgtttgaagggctgggtgcgtaggcacctggcttggtgatttcttcagcgcaggggaggtggagcctctgccaccccctgcttggcacgcgctcttccctgagcaccgcccttccagcccatcccagcaggctgccttctcacctctccttccctgccccttggagggctcctgttcatttttgctttatgaaagccggccaggcgctcatgtctgtgatcccagcactttgggaggccgaggtgggcagatcacctgaggtcaagggtttgagacgagcctggccaacatggcgaaaccccgtctcaactaaaaatacagaaaaaaaaaaaagttaggctgggcatggtggcccatgcctgcaatcccagcacccagcactttgggaggccaaggcaggcagatcacctgaggtcaagggtttgagaccagcttggccaacatggcaaaaaccccatctctactaaaaatacaaaacttagccaggcatggtggtaggcacctgtagtcccagctacttgggaggctgagacaggagaatcgcttgaacccaggaggcggagcttgcagtgagccaagatcgcgccactgctctccagactgggtgacagagcgagactccgtttcaaaaacaaacaaaaaaccccctaaaaccccaaagccctacatgctgtccctgagggcctccacccctcccgtggcctcagcttccacctctgttcttgttacacctgtctttctgcttaggttttagtgctgttctgatcccatttgggtgtcccaggggcccctggcttgccgtgcgtccagaaagagagccttatcatctgcctctcgcaaagcgactctcctcctccgtctgtatcacggctgaagcgtccgtcattctgttttctgaaacccaggttacttggtgtgtttagctctcggccccccctttactttctgtcaccaagtcctcttaattttgctcccgaaatgccttatgactctgaccctttcatgtcatttctgtggctgtgagcgcagtggagggcagcgcccctcggccccgtttcggtcttcccctggcccctcccttccagccgctccgttctctctctgctgcttgcagagtcctccagcaaagctctgcaggtcatgggcaccccgcctcgggccccttggcttccttcctttgccctcgagagagggttcagcatgcggcaccttttcccagcgtccgcacagcgccggcactgtttgtactgtgtgtgtgtcacctgtctcaggcccataatgttttccttcaagcggctcaggtgttacaacttcagtggacttgtttcagaaggcacctttacgtcactaccataaaaggaaaatcagggtggcctcccacaaagagggtctctgtcaaagctcagtaagtgactgttacagtgaagaccaccccaggtgccctcgggggcccgcggggaggcaggcgtccactctgggaagccgtgggccatgggatctcctccccagcgggccccttctcctcctcagaggcagtgtagcaccgtggtaaacgccacagaccctggggccaagcctgcgcccaagcctcactctgctcctttccagcaacatgatcttggtccgcttaacctctctgagcctcattttccctgctgtaaaaggggttaatactatttccttcagtggattgtggtattaaataagagagtgtacatggatcacttcacacagtgccctaacccttgaggcctgtttgctggcatttgcccttccccgctactttttttttgagacggggtcttgctctgttgcccaggctggagtgcagtggcgcgatctcggcttactgcaacctccgcctcccgggttcaagcaattctcctgcctcagcctcccgagtagctgggattacaggcgcctgccaccatgcctggctaattttttgtatttttagtagatatgaggcttcaccacattggccaggccggtctcaaactcctgacctctagtgatctgcctgcctcggcctcccaaagtgctgggattacatctgtgagccaccgcgcccggcctgccctccccttttgccagcctgctgtgccctcgaatggtgtgatgtgtctcctgggcattgcgacactggtggtctctccgtcatgctggtcacgttcctctgcgtcctgcttctgtgccctccccttccccgcttctcccgtaggtcactgctggcctcttctctaggcctagatcagccgttgcctcctgtgcgatcccgtagctggtctcccaaggagaaccagacctctcctccctgtgacctcatggcacttgattctgtatctcttgtttcaccccatgaccccacagtccatgtttggcactcgggtctttcaggtgggtgtgccgtgcctgcaggatggttttctgcattttgcccggatcattttctcagatgcttgtgaatcacacagacgtcgcctcccacgctgagacactacccttggtccccaagaactcaaaacacacaagaagacgtttggccactgtcccctcctcgctccctgctgtggtacttgggccaggtggagctggctttcccatggcagtgggaaggagcaccggaatgggagtcagagatctcagggttgaggtccagctctcgtattttctgactctgtgaccccaggctcacatagaactcggaatctctgctggcttgggtgtaaaccataaagcacgcatcagttctaaaagctgcttgtgcggtaaaggcttattttcccagggtgaggatttgcccatgtgggtagattggtccatcgctctgagatatgtgcacgagggggccccaggtgcccccaaccacagggctgtggaggggctgcagaggttctcccaggtggtctgcccgtagggtcctgttcctcccgcctcctgccctttttcctagccctggtgcagtttaggacttcaggtcctgtcctcatctaatgcacctggagggcagcaggagtgtcttctgaagctgcagcccgagtctggcccgggcctccccttgtgcccacgtgcagccacagggtcctgcgcagggtgtagcctgcagcagagactccagccggctcatctcctgcacagcctgggcctcctgctctctgtctgctctatgcaggggaccagtagccccctttgaccctctcccccttctgtcccctcacttgagggccttggcactttataaacgggtgtccaggccaggtgcgctggctcacgcctataatcccagcgctttgggaggctgaggcgggtagatcgcctgaggtcaggagttcgagaccagcctggccaacatagtgaaaccctgtctctaataaaaatacaaaaaattgtttgggcgtggtggcgcgtgcctgtaatccaagctgcttgggaggctgaggcaggagaattgccggaacccaggaggcggaggctgcagtgagccgagattgtgccattgcactccaacctgggcaacaagagtgaaactccgtctcaaaaccaaaaacaaacaaacaaaaaaatgggtgtccagaagccagttgtgcttcctgacacgttcctcctggagacttttttttttctttgagatggaatctcgctctgttgcccaggctggaatgcagtggcacgatcttggctcactgcaacctctgcctcctgggatcaagcaatttctggctaatttttgtattttgagtagagatggggtttcaccatgttggccaggctggtctcgaactcctgacctcaagtgatctgcccacctcagcctcccaaggtgctgggatgacaggcgtgagccaccatacccagcccctcctgagacttgctccccacttcccacaagcctgggccgaggtgatttggaagtggggcctcttccttggagaagagaagagaggctcactgtggggtttgggcggttccctcggctctccagcctccacgtgcttgtctgcataatgaggctgtcgggtggcatctggtgctttctcccacggctgctgctctctgcatccgtgaaccctgggattgaagtaggggtggggattgccattttgcaatttctgcggagtctttttttttttttttttgagacagggtctcgctctgtcccccaggctggagtgcagtggcatgattacggctcactgtagccttgatctcctaggctcaagtgatcctcccacctcagcctcctgaatagctaggactacaggcatgcacctggctcatttttaaattttttatggagatgggatttcaccatgttgcccaggttggtcttgaactcgtgggctcaagccatcctcctacctcagcctccaaagtgctgggattacaggtgtgagccacctcacccggccaacgggggagttttgaatcaccaaaggtctagagttggtgccccaaatctttggaatcctctcagagtatgtgctgggatgggctgtgaccccgaggtcagccctgccaggtaggaacaggtgcgcaacacctgctccttctcaagctacccattcactccacctgttggagccttttgttcctgaatccagtgtcctcttccctcccccacactctgccaggtctgctgggctcatgccctttctcccttccacactggccccagcacaggcatgagggtcatcagtgcccgcatctccatgtctgtccccttggggcttggaattgagccatgtgcatatacccggggcctggcggttcccacatggcagctgggctcccgtgtccctgtctcccagcttagcatccacagtatgtggggcagcgagtgcccagatctgaagatgtccctgcccccgtccacctctgccttctgatcagctttctgccttggcccctcctcctccgtgcccattcttcccgttgatttgagccttggcaacaaggcgaccagccatgtttttgcagcgtaccaggcactgtgctgagtgctttctgggccttcctcataacgccccatgaggcgaggagtagtcacaccgttttacagatgaggaagctgaggcatggagaggtgagataacctgaccacacagtgaatcaggagtggtgctggagtattgattagcaggagtattgattagcgattgcatcccgttcccctctccctgcagcccctggcaacctctcatcaccgttctgtctgtggatttgcctgttctgtggatttcatggaactggaatcacacagcatgtggccttttgtgcctggctcctgtcactcggcaccgtgcttcctaggtgcatccgtgttgtagcatgcatcagttcttcattccttttctttctattgtctttatagtcataagctatcagtttgtttttatttttattttattttattttattttgagacggagtctcactctgtcacccaggctggagtgcagtggagcgatctcggctcactgcaagctccgccttccgggagcttccgctattctcctgcctcagcctctcgagtagctgggactacaggtgctcgccaccacacctggctaattttttaaatattttttttagtagagacggggtttcaccatgttagccaggatggtctcgatctcctgacctcgtgatccgcctgccttggcttcccaaagtgctgggattacaggcgtcagccaccacagccagccacttatttttatttttttgaggtggagtctcgctctgtcacccgggctggagtgcagtggcacaatcttggctcactgcaacctctgtctcccaggttcaagtgattctcctgcctcagcctccttagtagctgggactacagacatgcgccatcatgcctggctaattttttgtatttttagtgagatggggtttcgccatgttagccaggttgttcttgaactcctgacctcaggtgatctgcctgcctcagcctcccaaagtgctgggattacaggcatgagccactgcccgtggtcctatttttatttttgaaaattaattatttttgcttcatttctttttatgggtgagcagtattccacagtatggaacaaccaaattttatttatctgttcgttggcggatggacacttggattgcttcccccttttggccattatgaatcatgtttcttgttccttttggtttggttttcccgagaagctctttgcagcccagctgtctgtattcctctagcttggctatttggaaagcaagagaaagcgtagctgagcgtgggtggatggctgggagcgggtgtggggaggggatgcaggaaaggggagtttcaggctttgggagaaccccgtgtggagggggccttacacctggccccagagccacctgctgctaggtgagtgtttttcctgtggttgattattaaccaacggttatgatcctgagagtagatccccaggctagaactggtgctcatttgagatgccagaaatgttttccaaggcatttaaacggccttggactcttgcttctgtctccacttggagaccacatcaacattttatgagttataatcatcatcatcatcatcatggtctacattgatatagaacttcatgttttatgtcacagctgttatttttttaaattaattaattcatttttttgagacggagtttcgctcttgttgcccaggctggagtgccatggtgagatctcggctcactgcaacctccccctcccaggttcaagcgattctcctgcctcagcctctcaagtagctgggattacaggcacccgccaccacgcctggctaatttttgtatttttagtagtgacagggtttcaccatgttggccaggctggtctcgaactcctgacctcaggtgatctgcccacttttgcctcccaaagtgctgggattacaggtgagagccacctctcccagccacagctattatttttaactccttggtactttattacccctatctttgcagatgaaggaaacaagacacaacgaggtaacttaaccaaggcctcacagctgggtagcaggcagagccaaacttgaacccaggaatcccttgattccaagtgtagggtgctctccatagcgatgtgtgagacatgacggttgcagtgacctcaagatggtctgaggcagagccctccgagggtggggaggcgaggagcctgcaggcctgggtgctgtcacaggggctccgccaggggtctgtctagctccgtctgggtgaatcatggcctttgacttctcagcttccactccaggcccctttgaccatttcctccagagatttgcatttggccaacgctggctaggacgcgtcctggtctccctgagcctccccatctgcccttggatctcctgtgcttctagggaggaaaagaatcccagagcagggaacctcagtgccatgtgagaaggggcagggcctccaggactcccccaggtggcagaggctctctgacctgcccttccagcctgcccttgccacccttctctttgaactgagtatgtaatcttcctcttctcttcctctggcttctctccatcctccttttcccttctctgctttccaagctgtccccatctccagcccctcctctcatgggtccttgtgggtccctgggtgggtctggggccccgcgtcgttagagttgcatgcgagtatggggctgggtcgcttgagggctgcggttttcaatctcagtgccatgacatgtggcaagatagatccctgtgggtcacaaagaagttgtcacctcggctaaggatttaccttttgcttctaattagagcacattcaaggttatcccttgatataatcacatcactttcacctcctcgtgtgtgatatgtttgcctgagtgggagaaaaagggataaaactgcatcaagcaccgcgtcacttaactctatcttatctcggtgccagctggtggctgggctgggctgtgcctggctgtccttgggagggtggctcatgtgtaaatgtcattgtcctggggcaggacaaggctgagcatagctgatcagagcaggggtggtgaggcagaagcaggatttcatcttcactgtttttggctctctaggccaaggctagaacctggggcctgggcactgcattcatttcctagggctgccattaccaaggacctcagatggcttaaagccgcagacatttattatttcagttctggaggccagaagtccaaaatcaaggtgtcagcagggcgacgctccctctgcaggctctagggaagaatccttcctcgcctcttctagcctctggcggggtcggcaagcctcagcatgcgttggcttgcagccgcatcactcctgtgtctgcctgagaacacggggcattctcactgtgtgtttcttcacattgttgccttcccttcttttttttttttttgagatggagtcttgctctgtcacccgagctggagtgcagtggcacgatctcagctcactgcaacctccacctcttgggttcaagcgattctcttgcctcagcctcccaagtagctcggatgacaggcacacgccaccatgcctggctaatttttgtatttttagtagagacggggtttcgccacgttgaacaggctggtttggaactcctgacctcaagtgatccacccccgtctcagcctcccaaaatggtgggattacaggcatgagccaccgctctgggcccagttcagatgtttttgagggtggcagtcatgccttctgcccaccctggcaccccctctggagtcctggacacagcgctggagcttgcatgaggctggtcaccactggtgctcatgtctgctctagcgccttccaagctcccaggcatcatttgggaaatccttctggtcagaagctgccatgtgctccgacttgagagtctgcctcgcttcctagagaccggccccaggagcttatccagtgtccagtagagaccggccccaggagcttatccagcatccagggggaaaaggcaggggagaggggctcagctcagggagtgttggatgctgcgcccttttgaccgggactcagggccttgaacaataatcatatgtgccctggtgccatgagcgtggacaccttgtgcctgatggggaaaaatagacagcatgactgtgtgtatgagcgtccagtgaccggtgatgttaaaaccagctctgtcctcctctggactgtgtgtttctggagagccagggctgctgtccatcaaggtgcctgcgagccatctccagaggccctctgctaagcccagagtcgccctatagcatctggtgggggcttgttttacttcccctccctgcgtgcttttccttgctgggctcctagccttacaggggagcagctgtcattctcaccatgggcccgaagaggacctgagggtgatgccctcctgcttgatcattcttcctttcccccatcatggctcttaaaggccaggcccattgaggaggagctgtggctgcttgggagagggccaggtggaggaggcggtgagcctgtgctggacccagctctgttgtgcacacaggcaggtgagtgtctggcagagcagccagactggagcctacggtggtaatgtccaaggccgtacatagaaggaggctggcagctctagctgagaggtagcaggagctggtgcctgcttttgtgtgtgtgtgagagtgtgtgcacacacctaggagctatctcagccctgctggtttcttgagccagttacagcctggatcaggcgggagagtcccccctctccagccatcaaaacttacatcaacaaggtccaggaagaaagaaagaggaagggagatggggagcaggagacagggattgccaggttcaggttaatggggtggaatggattctctgccaagccaggtagtccccaggcccctgatgtggctccctagttggccacagggagggctggctggtcaactgcaggggcaggcaggggtacacatgacccaggcctagcctggaagtgttctcagcctggtcctgctccgtgggctcagggagccaggcaggatggggtctgggcctggaaacctggagggctgggctctgtagggagggtgggtttctgtcatgaagaaggtgtggggttggaactgtcgcttcgctggcaggacttgggctgggaagaggggcagaaggattctctggaggtggcagtgggggtgctttgatcatttacgcaggacctgggggttgggctgactctctctgctgcttcagagcggggctgtagaggaggacacacttgtaaagttgggggctttgacggctcagcccggccctcttcggcttttaatacggttctcccagccccctcgtcccctcctgggtacagccagagcttgttcaggacactggagtccctcacccgggaattccccaggctctgcccagctggccctgttgtgcagccgtggctctgaaggctgatcccatgccaaaccgtctgcttggtgatgggaccgcacacagcactccccggtcaccagcgagggccagatggaaagtggggagtgtgtgagcgcggcaaacttgtcgcagtcatgttgccatggtgacacaactctgtttagctgcctctctaccgtcctagcccacatggactaagttaagttttacctgcggttgcacggcaggcagccctgtctcccgaggacagctttttgaccagggcctgtgtgtgtgtgtgtgtgtgtgtgtgtgtgtgtgtgtgtacgtgcagaggggctcaagggagaatgaatccgcgtttctcccctcctcttctcacacccagccccagtcctggatctctttagccccgtggttctcagactttgccgtgtagcagaatgacctggagagctcgttggagcgcaggttcctgggctcatcactggagagcctggtgtgcacctgcaaatgtgcatgtctttcgagttcccaggtgccgctggtggtccagggaccatacttagagtagcactgctttagattttggtgcattggagtaaagaaaatgctcccaattctggtttctgcattgtatttttttttttaattggaaacggagtttcattcttgttgcccaggctggagtgcagtggcgccatcttggctcactgcaacctccacctcccaggttcaagtgattctcctgcctcagtctctctagtagctgggactacaggcgtgcaccaccacgcccagctaattttttgtatttttagtagagatggggtttcaccatgttggtcaggctggtcttgaactcctgacctcaggtgatccgtctgcctcggcctcccaaagtgctgggattactggcgtgagccacccaacccagcctgcattgtatgttaaactgtgtccgagagcccagtcactcttggaggagagaagggaaggcgcaggcaggtcctcactcacctcttttggcctcttcacaggaagcaggagctggccaacagctcggatgcgaccctcccagaccggccgctctcccctcctctcacggcacctcccaccatgaaggtaagaggcttcgattcaggaaggcagggaggggagagtgtggggaagttgtgaggccttgctgtggctttggctccaggcccagcagcgtccgtcgcagtggggctgtggagtgtcctgacacctcggaggaggtgatgttcagttaagcaccagtgcgggggaagcatgacaagagactcagggtgtctgtgtcaaggggcggtgaggacattggggttgaaatggggttggcaggactcttggtaattggtagtggagtttgggaacaaggggcccagccaggaggaagccgggggatagaaggcagctgcccagaaggactgcctggggctgggctgtggccctcctgggacttgaagggcatttgcatgctggtctgccggcctctggctggcccttctgagctgggcctgttcacggcagtccccatggaagggttggctggaggttcgggtcggggtggcagttattttcttatcagcacttccttcgtgagcctttttcctggggagaccacagtccaggctgctaggcccaggaccttctcactcctggacgggagccgagggagcagtgcccttctgccaccatgaccttcccccatcacttttcagtccgacgcctcggcaggatggccacacaggcctgagctggtcctcagaggagacttttggctcagccagtgtttctgcataggctggcatgcacgctctccctccctccctccctgcctccctccttccttcacactctgtggagtgagtgaggactagtgctgaagaagtcacctgcctcctgagtcatctgaggggacatctaggccagctcctctctgtcctggggctgtgctctgagtggctcacagggagatcatcaggcatctcttcctcactgctctgcatcacccctcctcttccctgaacctaatcttttgcaagatgacaacccataggaagcagataaaacccatccatcttcctgttgttgtcctgtatccgatacccatcacatacagagccatgtggtatgcctcgaggagcctgtgtgttgaggggtagccagagcctgccctgggtgggttaagtggtcagcggtgggcgggggggcaggacagggtgcagggctgaccaaggagagctgtgctgtcttccttgtgcagtacccagagggcagtggaagccagaccaccttcactagcctagtgcctgccccagcacccagctcagtgttggtatctgagccgggtgctgggccagctctttgcacagggtaatgctaagaagcctgtcaccattccgagtgtccccttggtctacaaaggtggctgtgggatgcttgtctctgtcctcacagatggcaggagtttgcagggagaagtctgacagtctcctaggaggagtccctgaattctcttggcagattttacttactcatgtactcatttaattcatttaatacccagtatttatttgaattttgtattagttaggactcttggttgtaagtgacagaaacataactcactctggcttagtcataaaagggtattttttgcctttgtaattgcaagcatagacggcaggcatgactgcatccgcaagatcagtctcattctttctctcttctgtgttggtttcattctttgtcaagctgcctttgtggcagccgaagggtggtagcagctcctacctgtgaagtaaccccagtgaaaagaaaagtatttttttcccccagtagttctaacaaagtcccagggaagaagctcattggctggcttaggtcacatgtttgtccctgaaccaattaccggcaccagaaagatgaaaggctctgattggccagacctgggtctcatgaccgcccacctaaaccataagaactgagaatgagggaggggtaggtcctagagggaaatggcggtggtaccatgagaagaaggggaagggatgcggggcaggcaagacccacagctttccgccacatgtgcgcatgctcagccaggcccagtgctcggttctggggaccttgtagtaaaccagacattgtggtccctgctctcctagagcttgtcgtctagctagggagccaaaaatggaaaaataatgtcaggaatgagggctgcacagttaaacgtggtgaatattctaaaggtgaagcacagcatagctcagggggaacgtaaggttaggaggtggggggactctaacctagtctcggagagggtcaggtagggctttttgttaggaaatgatgtttcagctgagccctgaaaattggataggtgctagttaggctaaggtggagtccgagtggaggagagtgttctagattcttgctgttcaaagggaggccaagggaccagcaacacctgcaccatttgcgagccccttagaaatgcagaatctcaggttccaccccagaccactgaatcagagtcagcttttttatttttttgagacagagccttgctctgtcgccgagccagagtgcagtggcgcgatcttggctcactgcaacctccacctcctgggttcaagcgcttctcctacctgagcctcccgagtagctgggattacaggtgcgtgccaccacgcctggctaacttttgtatttttagtagagacggggattcaccatgttggccaggctggtctcgaactcctgacctcgtgatgcgcccgcctcggcctcccaaagtgctgggattacagtcgtgagccaccacgcctggcccagagtcagcattttaccgtcattttccggtgatttgtatacacagggcagcttgagaagcactgctgtgggcctctgcacatgcgttcaggcagccgagagagagaaggcgacagcaagaggaaccggagggagatcagaacagctggtgaagccggagttagtgttggagaggctgggcatgcaggcagggaccagatcaagcagacgcttggacattctgctgaagattttagagtttattcctagttaagagcactggagtcattgacgatgttacccagaggattaagatgagacctttggaaaatcacctggcgtcatatggcgaatgcatggcagggaacagagtggagaggggatgagctgaggctgctgcaggatccaggggaagagatggaagcctgactcggaggggccggtggggttgtttggaagtggttggagctcagattttgcaggtggtgaattgatgagatatgagatttggggagaaggaggcggcgagaatggctcccaggtttgtagccagtagatacatgggacaaccattctctgagataaaggttggtgcaggagggaggattaggattcaattcttcttcttttaaattaaaaaaaaattttagggacagggtcgtgcgctgtcactcagcctggaggatagtggttcattccaaggtcactgcaacctcgggctcaaggatcctcccatcttagcctcccgagtagctgggaatataggcatgtgccaccgagcccagctaatttaaaaattttctgtagagacaaggtcttgctgtgttgcccaggctggtctgagactcttgggttcaagccatccttccgccttgacctcccaaagtgctgggattacaggtgtgagccactgcgccttgtcgaggggtcagctctaagcactgagttggacgtgcctgaggctcagaagaacattctgtgctggaggtaaacatctgggagcccttctcctagagaagggaatggaagctttgggatgagtgagctctccagggagaggatagagcaggaagagaggttcctgaggcggcacctcgaggtggtgctggggtctctgcagaggaggctgggcccggacatggagggagaagcatttcacggtggtgggaccggcagcagtgccagctgctgctgagaggccaagtatggtgcagagtgcacagtggccactgggctccgcggcctggcagttgcaggggatgtaactcagaccagccctgggaggggtggggcggacagcagatggccgtgtgttgaggaatgggtggagatggtcagagtcagagggtgtagacggtacttgtgaggtggggagcctggagtgtgaggaaatgtggaaaggagggagtgaggcaggggtgctcaggaatctggaccacagcagggattatttttaacatattctttcaaaaaatgatttgtgagcatccactgggtgcctgcccctgctgcgctctcccatgacaggctgtcgggaggggcctcaggcaggcccggagcagagcagcctcagggaaagctcagcagctgcagtcaggaggtgtcccttcctcctcctcccccgtgttctgtccttctcccctttgagctcagctcagcaatttcccagcctgtgactttactgcccaggccccaagcacaaggtcagagctgggaagggaggaaggggtgagggattgtcctggggactcagactgggtgggggtccttctgtggttggggttgggggtcagtgtgtgtggtgtgcctggcccgaggggttctctttgtgactgtcatttgggttcattctgtggcttagcctgtggctgcagttaggagtctgtctatggcgaggaggttttttccctttgtgtgaaagctaaccacccatgagggatttaaaaccacaatcctcaccttacaccagcctgctcaccacaggagtgtcccatcacaaaagtgatgacattgatgaaataatattgcagctcctgcttgcaggctgtccgattctttccttaacttgagttccctgagcatagcgactgtgtcctattctttagggcccccaggccctggcttagggtggggacctgggacttgtttatggttgctgacagtaagggacatctcggtcagaggaggttgttctgctcctgaccctccactcctctgcttctggctggatcctatatcccagcaggcctgggctccacctgccacatccctgtcctagggtgaggccaggcctctgcttggttgacacatcccaggttattatagcacactgaggccagagacgccctggatggaggctggcctctctccgagggtccctggccctgagggttcatgaatcagttctctgttctttgagcctcgggcagtgggagaaggcttcacctggttctcttggcagtgcaggctcagggagggtgtggcaggggcacccctttggttgattagcttgggagtcacagaagattagggatgggcgatccatttcctttataggtaaaccagaagccccaaggtaggaaatgactctcccaacgcaacgccgttcctcctcgagtcaacagaataagttacattctttatttttatatttattttttgagacggagtctcactctgtcacccaggctgaaatgtaatggcgcgatctcggctccctgcaacctccgtctcccaggctcaagcagttctcctgccccagcgcaccaccacaccccgctaatttttgtatttttagtagagatggggtttccccctgttggccaggctggtctcgagctcctgacctcaagtgatccgccagccttggcctcccaaagtgttcagatgacaggcgtgagccactgcacctggcccacgataagttaaattctaagacccaaactagttttggtcaagtgctcggctcatctcatgcttgctcatctcacgcttgcgggcccagggacggcctcttgtggctctcccactgggaagggctggctggagcagtagctggcctccagcctgagagtctctgccgcgctccccccgggcccccaccctcactggcgtgcctgctgctacccgacctatacgcaccctcccccacctctttgctgtttgttttgaaggggattttttttttttgctaatatgaagctgataaaaagcaaccaaagagatgctgaccagatgggctgaataagatcccagttcccagccagagctcaaactggctggtgccgggtgggctgggagagggacttgaggctgcgtctgtgggaataccgtaggtggtttccaggcccatatttttttttggaagctgattttcatgccccaatggatcagcaggcatttagggaggggcagttgtatgcccagaattgtgctgggtcccctgggtcacatcgaagctgcagtcctccaccctcagagagcctgccgtctacaggggccctgactgagccggagaaaccagatggctcagtgtgacaaggctcagatgtgaaatgtggcttctcagtggggaggagaggagggggaaacgctatgtggggaggtggggtgggatggggcggggtggggcagccggaaggggccctaatggcaagcatgggggtcagggtgaccccctgggaccatagacagtaaaaccttcccaggccccgtgaagtaaaggggttgattctcctgattctctcgacgctcatgggaaggacacagagcatttcactgaagtccactctgctgggacttgacctgaccttgtccctggagccgcaccgggccctgagctggctcggtcagctgggaggtggcccttgctcagccttccacacccctctttgtgcaagtctgagggcagcccctctcagaccttctcctttccagaagaggataatgtgcgcttggagttcccactgcagggaccagcagaacgtctggttcctcccttgctccttggcacgtggctctccacggccagggaatgcccccaccgcctctatggtaggtaaggcaggtgtgcaggcttcctatggcagggaagaggatggagatcagaggagcctcctccttgcccctctctatccctctgggcagagctgggctgggcctccctttctggctcatggattacccaccggccaccctctctccctggggttggggggtggtgtgtgggggcttctgttccagcttgtagcacagcccccggcctgatttcgtctcttcttttgctcctggttcctgcctcctgtcttctgttaggctgtgcagggagacttgcccctcatcagggtggagtgacagtgtcagccccccatacatccaccagctctggatggatgaagggaggaggcatttgtgggagggttgacgggagcctttctgggctggggcaggaagggctgaaggacatcagcaaggaggtttggtttttccctcttcaagaaaaccctgtgtagggacaggagaggacagatatatattccctccatccctactgctggagggaggcccttgctgaagctctgtgggtcctgggagagtcacctctggtctccacatcgattgtgtttctgttgccgctccggacatggttgggatacaaccccatctcctcaggagccactgcccattgttctcttgactccatccaggagccaaggaagttcacatctgatttaatgcaggcatgaggaagggcttatttggctactgagggtgaggatgctaactaggaggctttaagaacatggagatgttggctgggcatggtggcacatgcctgaaatcccagcattttgggaggctgaggcaggaggatcccttgaggccaggagtttgagaccagcctgggcaacacagtgagaccccatttctacaaaaaattaaaaaattagctgggcctattggctcatgcctatagtcccagctactctggaggccaaggtgggaagatggattgagcccaggagattgagcttgcagtgagttatgattgcaccactgcactctagcctgggtgacagagcaaaatcctgtttcaaaaaaaaagaaaaagaaaacatgaagatgtctgcatgtgcacctacttacctgcatgcatttccctcctcacctgtgcacacctgagcatgtgcctattttccctaattctgttctcttttttttttgagatggaatctcgctcttgtcacccaggttggagtgcagtggcgtaatctcagctcactgcaacccctgcttcctgggttcaagcgattctcctccctcagcctcccgagtagctgggattacaggcacacgccaccatgcccagctaatttttgtatttttagtagagatggggtttcaccatgttggtcaggctgctctcaaactcctgacctcaggtgatccgccggcctcagcctcccaaagtactgggattacaggcgtgagccaccacactcggccttctgttcatgttttaaggccaacttgcttatgcttctggaagattactctaggtgtaactggatttttaaaaatttgcagacacagaaatgcgtaagtcttaattgtattgtatactttgactaatgatacacccacgtgagccataccttgatcaagaaacaggacatttctgcaaccccagaaagttcccattgtcctgacccagtcaatcataactgcccccttgaggagcaaacagtgttctgatttttttcaaaagtgagttttgtctgttctagaacttaattttttttttttgaggtggagtctcgctctgttgcccaggctggagagcagtgacgcaatctctgctcactgcagcctccgcctcccgggttcaagggattctcctgcctcagcctccccagtagctgggattacaggtgcccactaccactcccggctaagttttttgtatttttaatagggacggggtttcaccatgttggccaggatggtctcgaactcccaacctcaagtgatccgccttcctcaggcctcccaaagtgctgggattacaggcgagagccaccatgcctggccggtgactgtttatatgaaactgctacactgtttgccaaatggtcaggccatcttatatcctcaccagcagtgtcatttgagttctcgctgctctgcatcctcatcaacatttgccattgttggttttgacaattttagctacttgaacggtatctcattgtggttttaatccacattttctcatgactaatgatgttgaatatttttcatatgcttattgactattcttatagttcttttttcccttcctccttcctttaaattcggtagtcttcttgtaggcgttctttacatattctagtcaagttcgtttcttttcttcttcttctgtttttgaggcagagtctcgctctgtcgcccaggctggagtgcagtggcccgatctcagctcactgcaagctctgcctcctgggttcacaccattctcctgcctcagcctcccgagtagctgggactacaggcgcccgccaccacgcccggcaaattttttgtatttttagtagagacggggtttcaccgtgttagccaggatggtctcaatctcctgaccttgtgatccacccacctcggcctcccaaagtgctgggattacaggtgcgagccactgtgcccggccacttctttttttttttttttgagacggagccttgctctgtcacccaggctagagtgcaatggcgccatctcggctcactacaacctccacctcctgggttcaaacgattctcctgcctcagtcccccgagtagctgggattacaggtgcccgccaccacgcccagctaattgttttattctcagtaaagacaaggtttcaccatgttggccaggctggtcttgaactcctgacctcgtgatccgcccgcctcggcctcccaaagtgctgggattacagacgtgagccactgcgtccggccttcttctttttagaaatagagatggggactcactatgtcgcccgggttggtctcaaactctggcctcaagtgatcctcctgcctgggctcccaaattgttgggattacaagcttgagccaccatttctggcccatttcttttcttgtttttattttttggatacaaggtctcactttgttgcccaggctggagtgcagtggtgcgaacagagctcactgcagcctcaacctcctgggctcaagccatccttccacctcagccccccgagtagctgggactacaggctggtgccaccacgcctgactaatttttgaattttttgtagggagagacagggtttcaccctgttgcccaggctggtcttgaactcctgagctcaagcgatccgcccaccttggctttccaaagtgctggtattacaggcgtgagccaacgcgcctggcccatttcttttcttaacggtgtctttaatgagcagaagttttaattttgaagaagtctaattatggactctttccttttatgtctgtagctttgtgtgtcctaagaagtctttgcttaccccagctcacaaagatttccttccatgtattcttttagaagctttatttttatttattttttttgagacagagtctcgctctgtcaccaggctggagtgcagtggcgtgatctcggctcactgcaacctctgcttcctgagttcaagcgattctcctgcctcagcttttcgaatagctggaactacaggtgcctgccaccacacctggctgatttttttgtatttttactagaaacggggtttcaccacgttggccaggatggtctcagtctcctgatctcgtgatccgcccgcctcagcctctcccaaagtgctgggattacaggcatgagccactgcgcccggctagaagctttattgttttagctctaggtctaggataaacttgttttaatttaattatgtatggcagtatgttggggtctaggttcatttattgccatatggatactctgttgttccagtactgtatgttgagaagactttcctttccttgctgaactgctttggtgccttagtcaaaactctgccaggcatgtaagtgtacacgtgtgtttgtttattgtctctccaaccatggtgtttctctgcatcagggatggaaaatacgtgccatccgtgccgtcagtccaccgtttggctcccgtggcagatactggtaattgatcatggcactctttcccaagagcttagacgtggtctcagaatcctgttcaacaaagcaccgtaggcagccactggcagtcatttggagttgtcatttgagataaatcacttctggcatctctgattgaaattgtcacaagaggttatttgctgaaggtcccacagctggtgagtggcagagccaggatgtgggctcaggtttgtctgtgtgggtctgaagcctgtgctgtcttccccacctctacagactgctctgcgtgaatcatttcaacaggtcgcttcatctccgtgacctccagtctcttcacttgcataatagggacggtggccaccgggaggagtgggtgtgggcagtaatgaggtcatccacagaatcgctagtggagcatctgatacgcaggtgctccgtgatggactgtgacgatggcgatggtggcgatgacaaccatgatgagtgagatgcagatgcccttgagaaacacacagtcagggcttctctctagggaacccagagtagctggctcatcagagtcccttgcctcttcttatgtatcttcgggcccgtggccttccaagctggaggccccagagcggagccacgcttcctcaagtttgctaatagggtgcgagccacgggcttcggcctaggcgtctaggccagctgagctgtgctccttctctctttgtgggaggaacagctggctgggttcgtagaattctctttctgggaaccttcttgccctctctgttgattctccagcccatctttctttcctttggattggccacatgatcctgcctgccacaggggcgattaatccagctccttcgacctggtcctggacccctctgaggttcttcttaagaagttgaagcaatagagggttgtagctaagaatacagtttctggagccagtctgcctggggttaaggcttccccacttcttcttctttttttttttcttttttgagacagagttgcgctcttgttgcccaggctggagggcaatggcgcgatctcggctcactgcaacctctgcctcccgggttcaagcaattctcctgcctcagcctcccgagtagctgggattacaggcatgcgccaccacgcccagctaattttatatttttagtagagttggggtttctccatgttggtcaggctggtctcgaactcctgacctcaggtgatccacccgccttgggctcccaaagtgctgggattataagtgtgagccaccgtgcccagccatttttggtatttttagtagagacggggtttcaccatgttggccaggctggtctcaaactccagatctcaggtgatcctcccacctgggcctcccaaagtgctggaattacaggtgtgagccactgtgcctggcccccccgtttttaaaattcatttttattttgagatggagtcttgctctgttgcccaggctgaagtacaatggcacgatcttggctcaccgcaacctccgcttcctgggttcaagtgattctcctgcctcagcttcccaagtagctgagattacaagcacatgccaccacacccagctaatttatgtatttttagtagagatggcgattaaccatgttggccaggctggtgtcaaactcctgacctcaggtgatccacctgcctcggcctccggaagtgctgggattacaggcataagccactgcacctggccaaagcttaccctcttcttagctgtataacctctgtgcatctcagtttcctcatttgtagaatagggatgtattagccctgtctcccattgctctaaagtaatacctgagattggataatttataaagaaaggaggtttggccaggcgtggtggctcacacctgtaatcccagcactttggaaggctgaggcgggcagatcatgaggtcaggagttcaagaccagcctggccaatatggtgaaacctgtttctactaaaaatacaaaaattagttgggcatggtggcgagcgcctataatcccagctatttgggaggctgaggcaggagaatcacttgaacctgggaggtggaggttgcagtgagtcgacatcgtgccactacactccagcctgggcaatagaatgagactccatctcaaaaaaaaaaaaaaaaaaaaagaaaggtttaactggctcacagttctgtaggctgtacaggcagcaggatgctgacatctgcttggctgttggggtggcctcaggaaacttttattcatggtggaaggtgaagggagaggaggcaggtcacagggccagagcgggagcaagagagcaagggagggtgccacacacttttaaacaaccagagctcgtgagaattcactcatgatcttgaggacggcaccagggaggggatggtggtaaagcattcatgagaaatccgccctctgatccagtcagctccctgcaggccccacctccagcactgagggttacagtcccacgtgagatttgagtggggacacaaatccaaactatttcaaggataataagagtacctgccctgggtggctgtagtgaagattaattgagataatatgcctttattgcttaaaacagaggtatgcagtaagtgctacataaatattagtcattattattcctccaaaaaactttgtttctgaaatgtgcggagaatagcaatgcttagagagaccatctagggggaagtacaccaggttttcggtgaatatagtttgtcaggacgccctgatttctgccctgccaggtgcccacagctgaggggcctgtctgtggaatgaataaggattgaaattgcattttgtgtgagtggccttccaagagccttgtggatcagactccaaaccctgcctgataaatgtggatgcccttgagggtcttggaaaaaggctaaaaaccaggatccagcccagcatctgagccagacctggaggaaggaacatctttctgggttgtgctttcacctcttgccttctgaatctgacccaaacaggggtctccagggtggcagaaagaacctgcagggtcgccatcctcatgaaggtttttgggactagactgagtcgagacttggataattcggggctgggagcgtcccaaggctggcgttggaatgagttttatgagcagtttgtccctatcataagtttctttcctaacttcttttgcctgcagctgatattaaaatgagtctgtatttcggggacagatgctgaccttgtggggaacacgggaagtgggggcagggcctaaaagccatggggggccaggcgggggagcagctgccctttcagcctgggtggcccatggtctggggggtctgggctgatggtaaaggtgaccggctgccaggccctccttccttagccctctcctttttccttttctcttttttttcttttttgagacggagtcttgctctgttgcccaggctggagtgcagtagcgcgatctcggctcactgcaacctctgcctcccgggttcaagcaattctcctgcctcagcctcccaagtagctgggattacaggcaccgccccatacctggttaatttttgtatttgtagtagagatggggtttcgccatgttggccaggctggtctcgaactcttgacctcaggtgatccgcccgcctcggcctcccaaagtgctgggatgacaggcgtgagccgccgcatctggcctccttttttcttttttttttttttttgagacaggttctctgtcgcccagactggagtacagtggtgcgatcagggctcactgcagccttgaccttctgggcccaagcaactgtcctacctcagcctcccaagtagctgggaccacaggtgtgcaccaccacgccctgctaggcttaaaaaaaattttttttaattcgtagaagcagggtctccctgtgttcctaggctgtcctttccccttttctcgtcgtgctctcctcctctttctgcctgttggtgagggctcggctctgtctccccttgatggcattcagaagactgatagagcacttggcattcagggcgtcacccaggggatgcccccaggggccccccaacccccgccccaggcatgccacctgcctttggaagcctgaccagccatcccaccccagaacttagcccctgggtctgtgacatccctgcctgttttcaggccctgcctcccccgctggatggtgctgggtctggggacagagcccttgcctcttcctgggatttagaaaccaactgtgtgacatcgtgcagttcagtcatcttctgtggacctcggtttcctcatttatagaacggagctcaccctgtagggttactgcagggattaaaggaggaagcaggcggacgagggcttcgtcaagtgccaggcttctgcaggtgtcgaatatcggcacataatggacaccagtggttgttatcatggtcaatatgccaaacacgcatagggtggtttcattgataatcccgcccttctgctctgccaactgccatagactctactccactgagaccggctcagcagcgggatgctgccagattctgtgttctgccacccacccccatccgctaccctcttccatgagtgtcatttacccgacactcaagcctgctgtgtctgggacttcagaggccagtggatggtgggttctgtgttgcttcgtgaagggatgtcccctgcgtagatctgtgcctcagtgggttcctcctgtgtgtgcccctcccgctggcttcttctcccggagcccccccggcagactctgctcttggcggagtgtggagctggagtttcaggccttggggtgtagatttgattcctagggttgctgtaacaaattactgtgaacttgatgggttgaaataaaaggataaaaggaatttcttatcttttttttttcttttttgagacagagtctcactctgtcacccaggctgaagtgcagtggcgtgatcttggctcactgcacctttctgcctcctgggttcaagcaattctcctgcctcagcctcccaagtagcttgggattacaggcaccggccaccacacccggctaactttttgtatttttagtagagacggtgttttgccatgttggtcaggctggtcttgaactcctgatctcaggtgatccacccgcctcagccccccaaagtcctgggattacaggcatgagctaccatgaccggccaggaatttattttctcacaactctagaggccagaagtctggaattaaggtgtcagcagggccgttaaagtgtccgcagggcctttaaggtgtctgcagggtcgttaaggtgtcagcagggtcgttaaggtgtcagcagggccgttatgtgtcctcagggccgttaaggtgtcagcagggccgttaaggtgtccgcagggccgttatgtgtccacagggccgttaaggtgtcagcaggaccgttaaggtgtccttaaggtgtccgcagggccatgttcccgccagaggctcgaggggaagctccttgcctgcctcttccagcgcctggtggctccaggccggggactgcacagctctgctctcttcctccgtcttcttcacatgtctccctcctcttctccctgggggtctctcctctgtgtgtctcttttaaggacacttgtcattggatttagagcccacctgggtaatcgggatgatctcatctcaaactccttcatatcttaaaattatatctgttatctcagtctgttccaactgttacaacaaaataccttagactgggtaatttacaaacaatagccatttatttctcaccattctggaggctgggaaatcccagatcaaggctccaagagacccactgtctgatgaaggcccacgttctgcgtctaagatgacaccttcttgcagtgtcctcacagggaggaaggcggaaggacagaagggattcgctagtccctcaggccttctatgaggacgttaatcccgttcccgagggtggaacctttattacctggtcacctccctaggccttgccttctaattccatcaccttgggagggacatgtacattcagactgcagcatgggtaaagaccctttttccgaataaggttacacactcaggttcctggatacagacatatctttttgggggccaccattacggggtcagggctgccctctcctgggagttcctggtgggagcttggtgaggtccccgaggtctgccagcacctgctctccttgtgtagttgtaagtcattcaagtgccactgcaagggtgtgtgtgtgaggtacagggtgttgcggggctgggaggacccagtgcagctccagctcgcacaaatggggtagagcatgatcttcccatccctgctgccccgggacctggtacatatggggccatggcaggtgcttcataaacacttagtagttggtgcttaataaatactcacaataggttttcagtgaatcctcattgattgatccagccttaaggatgtggcaatgaacaaaaaagtgcccagtattttctttttgtttttgtttttttttttttttttgagacagaaattcgctgatgttgcccaggttggagtgcaatggtgcgaccttgcactaccttggcttgtggcacgaccttggctcatggcacgaccttggctcactgcaccctctgcctcccaggctccagcgattctcctgcctcagctggagtagctgggattacaggcgtccaccaccacacctggctatttttttttttttttttgagatggagtcttgctctgttgccaggctggagtgcagtggcacaatctcagctcactgcaacctccacctcctgagttcaagtgattctcctgcctcagcctcccgagcagctgggactacaggcacctgccaccacacccagttaatttttgtatttttaatagagatggggtttcaccatgtcggccaggctggtctcaaactcctgacctcgtgatctgcccgcctcggcctcccaaagtgctggggttacaggtgtgagccaccgcgcccggccttttttttttttgagacagagtctcgctctgttgcccaggctggaatgcagtggtgcaatcttggctcactgcaccctctgcctcccaggctccagagattctcctgccttagctggagtagctgggattacagacgcataccaccacgcctggctaattttttttttgtatttttagtagagacagggtttcaccatgttggccaggctggtctcgaactcctgacctcaggtgatccacctgcctcagcctcccaaagtgctgggattacaggcctgagccaatgtgcccggctgttttcttagataatttttatcagttttttttttgtgtgtgtgcaaataaccagcaaatatgaaacaccccagacaattttaaataaaatgatatatgcatattataaagttaaagcaattgtaaagtacagagaaaataaaaaaatgaataatgtcctaatcataatcctaccatccagaaatatccgttcttaccatttgctaatcgtccagacatcttggcatcatacacatagatagaggcaaacataaatgagatcacactgtttgtgctcctttgtaataaaaagagctaaattcaattttccttgcattaaccaatgaagaagaaataaacaagtggctcagaaggagttgctgaagtttagagaaatgtttcctctctgtaagagatattaatttctctaagagttctctaacagtgaggaaaaagattatgataaaaagaaccaaacctttggggtagagatattaatttaaaaaggtaatttcaactttatacatagagtttggctccctgctttgaatatgagagccaggtgattttggaggagagagggtgcagtctgggaactttgagagtgctccttttgaggggacctgctgttctcagaagagcaggctgagtaacggtctgcacctcccgatgcctggagggagtgttccgagccgaggctcagttacacgtgggaatcaagcagagcccatcccgggagcgaatagggtttgttagcaaatgacatggctgagctgatttgatttggcagcaggactgagaagtttctgaaatgtcagatgttaataggatggctggttgtctctaaacgggaagccagaagtgggggtggatggccaggtgacgtcatctgctgtagaggaggaatttgggagaaaggaaatcggaggtggggaggggaaaagagggaaggagggaaggaaggtggaagatggaggagagaggccagtggcattagaggtggagggggaaagcgaatgagatggggctggtggaggagttgggtttgcttccccgaggatcatacgttggggtgggctgagtttgtcctcaaatatgttttgtttggccaacgtgatgttaaaaaagtcatttcaatactctttagggggaatgtcccctccccaatcctatttcgtcttggagcctatctcctccctggcccctgaagacatctgggtttgagaccttcgccagatgacctgtggctctttctagagctctttcctccggggggctagtgggtggcccaggctcagaggagaccagaattgcatctcatctcagagatgccacggggatcaggagaattctgagaatcaggtgagatccccaatggtgccctgacctcaggccgctgtggattccagatgtggtttgggactgtatgtgagtgccccttggcggtggtcagttccgtggtctggagagctgggctgtgggagacaggaggcaggagctgttgttcttgtctgcttggcctcgtgcttggtgactcttggttgaaccgggaagatgtgatctctgttctttgaagacataatggccgtgaggaggcaaaaaccacagaaaccttcctccaaaagtgatgcaagatgagccattcgcacactgctgtaaagaaatacttcatcgcagtataaatagaagaaataccggagactgggtaatttataaagaaagaggtttaattgactcacagttctgtatggctggggaggcctcaggaaacttacaatcatgaaggagaagcatgtgccttcttcacaaggcagcaggaaagagaagagcgaaggaggagcttccaaacacgtaaacccatcagatctcatgagaactcactcactgtcacgagaacagcgtggggaaaaccgctccctcgctccactcgtggggattacagttcgagatgagatttggatggggacacagagccacacctttgccagggtaagctgaaaaggccaggaattccttggatgatgctctccctgccttttctctaagaggaggttgattctggggcttggaaggtacttccaggccatccttgaaggagctcagagtgagtccttcaaacaccagcatggaaaagcagaaagcaggccagcagccctggtcagatctggggagcaggaaggcaggtctgcaaagcctggggagggtccagtcagcgtgggtccgggccgggttaggaacctggtcaggccaggcccggtggctcatgcctgtaatcccagcactttgggaggctgaggcaggtggatcacctgaggtcaggagtttgagaccagcctggccaacatggcgaaagccctgtctctactaaaaatacaaaaattagctgggcgtggtggtgggtgtctgtaatcccagctactcaggagagtgaggcaggagaatagcttgaacccaggaggcagaggttgcagtgagccgagatcatgcccgggcaacacagcaagcctctgtctcaaaaaaaaaaaaaaaaaaaggaacctggtcagagcagagcaaggctgagccctgggggtaactgagcttagtgttactcatggagacaggagccaggaagcgcaggcctcccggcccatcggtgcagcctgacttggcgtggacagccccacctccacgggcagcgcccacgtcctcttcacacggcatgatctctacaacccatctggcagctttctccttgctgtgtgagtcttgggcctggtagaagtcaggagtgtacacttggttttttgaggagcagctcagagcttcaaggcagttacaacaataaagctcactgcacactgtgaatatgtgccccagagcatcgcagttttgaggatgggagtgagactagcagttcagaggcacggtgccagagtgtcacagttcctccctcccccaaagccagcttgtacttgaacctgtcgggaggtttctattagtttcttatggccgctgtcacaaatacccacacacttagtggcttaagacaacacaaatctatcatcttacagttctgaggttagaagtatggaatgggtctcactgagatcaaatcaagatattgccaggggctgggcgcgatggctcacatctgtaatcctagcactttgagaggccgaggcgggcggatcacctgaggtcaagagttcgagaccagcctggccaacatggtgaaaccctgtctctactaaaaatacaaaaaatactacaggtgtggtggtgcatgcctgtagtcccagctacttgggaggttgaggcaggataattgcttgaacccgggaggcggaggttgcagtgagctgagattgtgccactgcactccagcctggggaacagagcaagactccatctcaaaaaaaaaaaaaaaaaaaaaagatattgccagggccgcattccctctgtaggctctaggggacaatctatcctcttgtcttgtcagctcctagaaggccacctgtattctggccccatacctctgttttcaaggccagccacgctggagcaagtctttttttttttagacagaatctcgctctgtcacccaggctggagtgcagtggcgcgatctcggctcactgcaagctccgcctcccgggttcaggccgttctcctgcctcagcctcccgagtagctgggactacaggcacccgccaccgcgcccggctaattttttgtatttttagtagagacggggtttcaccgtgttagccaggatggtctcgatctcctgacctcgtgatccgcccgccttggcctcccaaagtgctgggattacaggcgtgagccaccgcgcccggctgagcaagtctttctcacaccgccgtctctcggattccctctcttctgcctccttctcattacagagactcttttgatcacactgggtggacctgggtcatccaggcccctcttcccatctcaggggcagccttaattctagccacaacctgaactcccccttgccgtgtaacctcacacattcccaggttttggggattgggacaagggcacctctgggtgtgagtgttggggggcagtatttggcctatcacaaggacccaccttcatgggctttgctcagccctgggtcctcatcggtaaaatgggcatctctacctgcttcctagaggaaacgctagccggcccaccgcatagcgggccttccctctgtgggattccgtagttctgggactaattcttcacctgcctgatctcattgctttgcgagcccgtgactgatgatacagtatcagatgtccttgccctgatcccacgaccatgagacttgaagggcagggatggaatatgtgcctaagcatttccacagagagaagagggacatagcacacacgctgcagcctagaggagctatgaccttggttttgttaccgtcagtcagctgcttgctgatcccccagcaactgatggaactgatggaaaagccaccactccttgagagaggaagaaaaaagacttatgttaagctttgcccagctctgatttggacttgcccaattttacttgaaggaaggtgccactgtccgcttcccattcacacatcgccgccttcctcctgtctaaccggaatctttcttgttgcaatttcagcctgctggctctccatgcggccggtggggaaacagcaaagctggttcccacattgataatgacacctaatcctgcaatctgcttctgtccggttctaatcacgccactgcttccattcccaggaggaccaggggcaccctctgtttcgtcctgacaaagtggactgcccatggttgacagcctgcgtgtccggggtcgcctgggggtgagggtgggaaggtgtgggagggacggaggcactgccttctgctcagatgagcagcacgtagataaccctccccaggtgacctgcctggcatggaaagtccttctcgtggtcccccaggtcagatagcgttgcctggctacggggcagtcagcgaggctccggcagggcgagtaaacaggcacacatgtttaaaattcaatatcactggcgggcaaacactccagcagcgccttccagcccaccgataatctctaattctcctcgcttgatgcgtgtgggggccctgcaccaagacccagatggtctcttctgggaattggtcgtcagctgttgtgagggatggggagtcggaggggtgggggtgcctgttatagcctcagcctcatgcagactatcatcctgatcgctctgggcaggctcctgagagacccaggggctggtctggattcactggctgggtggagcttccagggtggggagctgtctgggttcagtggctcacacctgtaatcccagcactttgggaagccgaggcaggacaattgtttgaagccaggagttcaagaccagcctgggcaacatagcaagacccctccatctctaaaaaacaaaaactagttgggcatggaggtgcacccctgtagtcccaactacttgggaggctgaggcgggaggatccctggagcccaggcatttgaggctgcagtgaaccatgatcgcgccactgtactccagcctgggcgacagagtgagactccatctcaagaaaaaaataaaaggcaggggcctttggggaagctcatgcagatttttgtctgccttaggctgcaaagaggctgtggagggggcagggcctgtggagggtgtgcacccggcacaggcgatgagtgagggctggaatctggcaatcccctggccccgccaggtgactgtgatgggcggcatttattaagaggaaggggcgctccatctgcagggtggaagaaggtaagccagcctcctctttgctggaggtgcacacatggctgcctggggcatctcctggggcagttggtgagctggttcctggtaaagtcattcctcgtagggatcgtttggcatcaacacggggagcaggtgaggttgactgttttccctgcatgtgcctcatgcttgccctcttccgttgcttaggcttccttcccttcactgcctttcatgtgtcaaggccaggttatgcccctggtagcgaagaccccgggactgccctgcccgctccacgaaggcagtgggctcttttcctgggtacactgttttccagaggcagccctgatccaggctgcctgatagttccaggagatgacggtcctgagggtgcgtgcccagcctgaggcttgtaggttcagcccagatcaccagtgcaccccgagatcaccagtgcacccacttctccagtagacatggcctgtccttcaggcctcggcggggggcagggccacgatgagcagactcgtcactcccggagccacctgctcacccttccctctgagtagcagtgtggccaaaggacctcttagtttagtgccttggggccatggtgtgtcacctgccctgtgtggctctgaaaggctcctggaagggtgtctgggactgtaagaggccagggctctcttcgagatggatctgccttgcagtcaactgcctcagcctcatccatcgctggctgggagatgactgggagcgggattgtcccagctgtgggtctggaccttcctacagtggctcaccaggcccccttgtggccaataccatcagtaccacgtgggagcctgtggctggggctgggggtctggggaggggtgacaagcccaccagctgctcactgtgccagctgggtagacccagagggtcaggcggccaggaactgggaccctgccctgcgtccactgccagcctcagtgctcaggtgccctggagacctcattagaccaggcctgagtgggggcgtggcagcttcctcactcggaatggaggcttctgttacttgccctgcatttcctacttcgcaggctcatccggagtttcagtcttgcctggcctgcagcttcagccgaggtctgcaaggcagcaccagctcttggagccaggtgggaatgccgcttcaaacacacgcacagaggcatcgctctcttttggtagaaaagctgtcggattgtaagacaaaggctgaggtctctaacgtgtcctcctttactctgggtgcctcttgtgttacctttgtgcttgagtggggggaccacaggacaggcaaattagaaactgcacgaaacaaaacaaaatgcaaagaaaaacaaaatcgaaacaaagaaatacaatataaaacaaaacaaaagagctgggcgtggtggctcacgcctgtaatcccagcactttgggaggccgaggcgggcagatcacttgaggtcaggagtttgagaccagcctggccaacatggtgaaacttcatccctactaaacatacaaaaaaactagccaggcgtggcatgccctgtaatctcagctgcttgggaggctgaggcaggagaatcgcttgaacctgggaggcaggggctgcagtgagccgagatcgtgcccttgcactctggcctgggtgacagagcgagactccatctcaaaaaaaaaaaaaaaaaaaaaaagaagaagagaaaccacaacagatgataactgtttatggcaggagggtgtgtgcagctgggtcatggtccccaccttttgggctgataaacctggctgagggctaggcgtgtatgtttgccatgagtgagtgtttcttgtgtgtgtgtgtgtgtgtgtgtgtgtgtgtgttgggtgaacgtgactgtgaatgttgtggttagttctttgttgtatcaagtgttttggatgtctgtttgggggtggatattgtgggacgccacgttggtgtgaatgtatctgcagctgagtgattcccccagccaggacagcggggccgggaaggacagcccattgtccctaccctaacctcgttagggcctcgtttgccccagcacccccttcttcagccccagctggcaaaagggggtggggcaatcgtgttatttaacatacagcttatagggaagagagctgttgagcattaaagcccccatgcggttgttcatgtataattaggctgtgggagcttggggactgactgactgttagaatcactcgggaccgaagcacttatttaagtaatcattaactggaagatgggaaaggaacagaacatgcaatttgcagatgtcccctcttcttgcaggtcagcctgaaatgaaactcccagcaagtgaggaggctggcgccttgctcagccttcctcttccctctggtgaggggaagggcaggttaggggatgctggggctgagttggggttatggagatggcatctctcaggcacatcagaagcacaagccccccaaaatttccagcttctcatgactccttcgctgacaccgccctttacccagcagcacaaagatatataatgatatattcagttctcagtccggcgcatttgatcaacacctgctctgcactaggccagggacggctccagcaaagtcccagtaatccgttgtcccaggtggaggaggatgttaacaggaagagcccagataattgaaattctggtttagctcatctgtaaatctgcttttgctgcttcccagcagtgctgatgtggtcatgggggatgggacgctgtgttttcctccttcgcgctgaagcagagggtgcctggctgggggtctctaggcaggagcgtgtgggagcggccaagttctggagcagttaaggctgttagtggtgacggggcacctcatggtctctctgggggacaactgcagccccagtggaggaggagggagactggccaactgcatatcccataacaagtgtgggacccggagctcagggagaggagagggaggaagggtgttcggtatgtggtgtgtgtcttggcatatgatgcctcttgctttggaaattctgtgaggttccatcctttttatttattatttattatatcgcgccactgcactccagcctgggtgacagagtgagactccatctcaaaaaaaaaaaaaaaaaaaagaggagctcgagaccagcctgaccaacatggtgaaaccccgtctctactaaaaatacaaaaattagccaggagtggtggcgggcgcctgtaatcccagctactcaggaggctgaggcacgagaatcacttgaacccgggggaggcagaggttgcagtgagccaagattgcaccactgcactccagcctggcagcagagcaagactccatctcaaaaaaagaaaaaaaaaaaaaaaaaaagagcagggaccacgggcagggtatgggttccatgtctggtctgtgatgtgttccctctggatgggcaaacccagaagcttcttcagcccctttcctcctccaggcacaggtcgaggctgggattgcgggaggaggggaatggcactgggatctggagtgcctggttctcaacacttgcttggcagaggggaggaggcccagtgtccccgcgtacagggcagcatggctgcggtttccctcctccatgagccagccagccagacagtgggcaggagagggcgggaagagagaagggcgagtggaaggaaatggagtcgtgtgggcgggtgagcaagttggaaagcgcctggtgtagagaggaacattgttggggagcagagaccactgtggagtgagggagggggccagctgtgcctcttgacacagccagacacctgcccgccagggccagtaaagtgcctggtgtagagaagaaccttgcctggggggcagagaccaccgtggagtgagggagggggccagccgtgcctctgacacagccagacacctgccttccagggccagttaggagagggtacaagctgcggagcccatggggctttgcattttccagggacaaggaagcttggagcgaagcagagattttccgggaggccaacacctcccttttctcccactctgtcagcctggggggctctttattcccattctttagagagagacacggtggagaagatgggaccacagctgtggctgctgggtagaccgaggccaaaccagccccctgctcactttcctgcctctaagcctttgcctgggctgttccctctcctagaatgcctaaccctctagttgaccctgttacggacctggcaaggttagtcttgaataacctgatgagatttccagagctgcttttttccagttcccccactaagaggcttagacctgaagctgagccccactttgggggaagactggaagtttcaggttgaagaccggatcaggaccaggagctcggccagctgacgctgcaaagcctgccttggagagtctgtggcgtaggaaccttacgccttaaccagcgtgggcagctcggaagcaggagccccagttgtttcttggaaaaatggggccgattgccccaaggcagccacgcccttacagagcctcttgcaaatacccacagggtcacccgtctttggtcacagccacggatggcgtccgtcatccatgcctcatctttatcctgtttgtactttaggttggttcagtacttgactgtttacaaagcacttttttttttgagacagagtcttgttccgttgcccaggctggagtgcaatggcacgatctcggctcactgcaacctctgcctcctgggttcaagtgattgtcctgactcagcctcctgagtagctgggactataggcatgggccaccatgctaggctaatttttgtatttttggtagagagggggtttcaccatgttgaccaggctggtcttgaactcctgacctcaggtgatctgcctaccttggcctcccaaagtgctgggattacaggcgtgagccaccgcacccggccttgcaaagcactttcttgaactcttctggttcttgcagaaaagaagaatgatttccccattgcgcagagaagaaaatgaaatactccttttagccagctggtaagacacaaacctgagtcttgagatttcaaatccactgttctttctgttaccccaagaaataattactgagtacaaataattactgagtgtctactactgtatttcattgcttcgaagacactttcttccctctcatttaacaactctgaaatcagggtgcatctcatgagcaatagcacaccgtaatttgtaattggaagcatttttgctttcttagcggagaacaaaataatgtgtaccttccagtggatgtccttttagtttgacgaaatctggtgcgtgcacaactgtggtgtgtgtaaatatggcctctgcctgcaaggtgtgcagtttagaggaaagatcagtcttagctattcgtgtgaaacagaatatgacgcctaccaaaaccaactcgagtgccgtgggaattccagctgaggggcttcagaaaagctttagggaagacgggtgggatttggcctctcagcatcctgtaccatctgcatcaaccagctgatttagacaatacacccaagccctgttagagtgaaggctcaaaacttggcccctggaggctgactatgggtttgcattgcctgtcgttctagatgtttaactctcagcctcagttttctcagtgacagagtggatgtgatgatagtgcttgcctcacaggtaggcgtgaggatcagataaaagaacatattcaggccaggcgcagtggctcacacctgtaatcccagcactctgggaggccgcagcaggtggatcacctgagatcaggagctcaagaccagactgaccaacatggtgaaaccccatctctactaaatacaaaaaataagctgggtgtggtggcgggtgcctgtaatcgcagctacttgggaggctgaggcaggataattgcttgaacctggtaggcggaggttgcagtgagctgagattgtgccattgcactccagcctgggcaataagagtgaaactctgtcacacacacacacacacaaaagagaacgtcccacatctttagtcaagggtctgacagatagagtgagagatcaataaatgtcacccccccgcccccatcctgaaattaattctataaatccagtacacgtagagccggcagacatttgtcgttcgatcactgttgcaatgtcaagcacgttcacatttgtggcctcatttgatcttcggaagtgccggaggatggggatcattactccagtgtcacaaaggaggcaagtgaggcgcgaggcctcacagctggccggtgaccgggctgggattcggaggctggtctgtctgacgctcagtcccatgctctcttcaccggattgcagctgctggagaaaaaccacaagcaaggaaggaaacgcggccgatctggcgggtttgctccagccggggtattttataaatgaatgatcactgctgggcatccttaatagtggggtttctggtttcgagagaagagaggtctcatttagaggctcaggaggctaatttgacggtggggagatgtgcgcagaccgccatctcctctccctgtctccacctccagtggccggtggccagttttgcctctttttttttttttattattatactttaagttttagggtacatgtgcacaacgtgcaggtttgttacatatgtatacacgtgccatgttggtgtgctgcacccattaactcgtcatttagcattaggtatgtctcctaatgctatccctcccccctccccccacccagttttgcctcttaagtactatttgtctcgctggccttcatgcctccttctttgcttggttgcctcccctggccatggagaggatgtcagagtgtggtcacactggtctctgctcatgaccctgccaggggctgtgggccttctccgccagccagattctcctttgtgccctctgaggttaacacagacaaacgcactcaccttcttcctccctcttcctctccttcctccctgcctcgaacctctttcactcagaacacctggctttgctagtaacaggctgtgtgaccttcagcaggccagttaacctctctgagctttagttaccctcccccggtgccccaaaatggatgatcatgagggtcaaatgggaggtggtaggaatgggtcctgggctctgatattgagtcttgctcttctactgtgtaccattagacgcagccctgacttcctttttacctctgtggctttatctccaaaacagagggaataactctctggaagtcctcccgggacccccttccttgcaggagagccattgcccactcctctgtgcgcccaggcagctgtgggctttacccatgctccttgctcttcgttttccggattgtaattatttgcttctatgattgtcatagtcaccagactgaagtcagttcctttcttcagttattcattcagcaagtgtttactgagcatctgtgtgccaggtgctgggattacagatgaaatgggggaaacagctaattaaacgagaagttttaaagctgagagttaaagtggttggatagggcatgtgtaggacgggagtaccaccttgggacagggaggagggtgcagaccaagagggcttcctggaggaggtgacctccaagttaagacctaaaggccaagtaggagtcaagcaaataaagtggagtgggaaggaggagagggaccgagggtgatcttccttggtctccagctccaagccagtgcctggcctggaggagatcagtaagttggttctccatctctcttcttccttgctccttctgaatgccttcctgcaaagaggcaggagcctggatccttggttttctggaccctgggatgctgtggccaagggggttgcagaagtgttctggatatggcatgtccttccagcttggggcacgccacgttcctgaggctggggctgcaggaacgggcatggcagcgtgtgctgggggacactgtgctgaatgattcactggctctgagtaggagtggagatgagccaggccagcagcacgtgcaggagggagctggaaggatgctgaggatgcacgagccttatcctgggtccctttttccaggggaaggagagaagggctcagtaggggacagcgaggctcatgaacttgacaatatcatttctccaagatagtcttttatgtcagaattttgagttggaaggaacattgccaggcctctctgcagctaggggtccctctagcacatggagcttccaaaggaagtgaggtggtgcagttcacatgctagagctatgctcctctcctcctttatgccctgacctccagcgtcattttaagcccccggggatggacctgtgccaaggtcttctctgcctggcctcgattaagctgtgtcttcccccagcccctggagacatttcctggcctctgttctcccttggaagactgtggggttctggagctgaagcaagcacaggatagggctgtgctggagagaggagacgggctttgtgcctggtggcaggctgggcaggagcagggagcgagcacggagccagggctgggaggaaggatcgatgatcatcacaatccccattgacagaggacatttcgtgtctcaccttgctctggacacagcacgtacgtcatgtcctattctacagccactttgcagagtggcttatatttctcccattttatagatatagaaactgaggctcagaggctgagtgaccaacccatgcagcttgtcagcagcagggccacgagttagtagcttgtctgccccacactaggtctggagctgtttctcccacaccacactgccttgttttgagggtttaaaaaattcattcctttccttccaagctggggaccttgctttcctctcaaagctggaacagaaccgagggccctggatgggtatggagcgtgacatgtcattagtgttggaaaaagactgtgagacccaggggatccctgggctgagccggggctggcttctccttccccacagcaccaagtgcctctgggccctgagctcatggtgtgtctcccccagccattcgctatctttaattttttttggtaaaataattacagggcatgagcactgctatctttatttaaaccatgttaattttttttaaaacagagtaacacacacacaaaacaccttggataaaaaaaataaatatctggctgggtgcggtggcttatgcctgtaatcccagcaatttgggaggcctaggcaggtggatcacctgaggttaggagtttgagatcagcctggccaacgtcgcaaaaccccatctctactaaaaatacgaaaattagccgggtatggtggcgggtgcctgtaaccccagccactcggggactgaggcaggagaatctcttgaacccaggaggcagaggttgtagtgtgccgagatcatcccattgcattccagcctgggcaacaagagtgaaactccgtctcaaaaaacaaaacaaaacaaaaaaaatgcttcaggctgttcctcaaagaaaacggttccctatgcctctgcacacccctttccagtcctccaagccaccacttattctttttttttcttttttgagacagagtcctgctgtgtcgcccaggctggagtgcagtggcacagtcttggctcactgcaatgtctgcctcccgggttcaagtgatcctctgcctcactcccccgagtagctgggactacaggcatgcgccaccatacccagctaatttttgtatttttagtagagacgggctttcgccatgttggccaggctggtctcgaactcctgacctcaggtgatccacccgcctcggcctcccaaagtgctgggatgacaggcgggagccgccttgcccggcgcacttactcttttagctctttcttcacacctcttaggtggtgtgaggtgcgtgggaatgcctcgaaagatgcaggcaccggtctctcttttacttgtttttatttttcttgcacagagagggcttcccagttcagagaagggaaaattgaggcccccaccaaggggagcctgctggagtctccaaacacacaagacccggggtctccttcaggcccaacactgtggctggtttcctgtgtcccagtcgtgccttccgtccggccacgcgggccagcagtgttgagaactcactcagggcagggatggaggggggaggcttctcacccctttaccttcctaggccccagtgggcgtccattcatcacctgctggcgtggggcctctcccttggaagggacccccttgcccttatgacgtaagacgtgtggcacctccatcagccctgggttccccagaaaaacgcccgcggcagaggacaggtcaaaggtcagcgctagtcagcgtggactaacagcttcgggcggacacccgagtcctgtagttccttgtttgatctgaaggaagttgtccagcgtcagcagcagccgccgccgtggtggtagcagctgcagtggagctaaaggcagcagggccccgactctcgggacccaggccctggcgggagatggatttcttaaagtaccttttcgtgagtgtccctgggctgtggagggatgcccgtccaggccctgctgcctggagggggtggggaacagagcctctcctgttgtcacctggctgggagccccgagtggctgtttgcctgccacgggtcatggaagccacccttcactcaggggaaggaggaaccgagaccagggacagaggggcctctgggtgggggatgtggagggcaggggacagactcagcacccgggcctttcctccctggcttggagattcgaggtgggtcctggcagagggctggagagaactcacttctgtgttcctctgggaaggcttctcggctccctgccggggcccgagggaacccactgccagccaaaggctgtgcataggtgggagttgccatggcgagagggggagggactcctcagctgggcttccgcctggcctggacgcttggagctggccaggctgcgggtcccgccctctcttctttgggctgtggttctggggactctgtgtcctgtcacggagcctcagagtgtggttagtgtgaggcccagcgaggagagtgtgagccgtggtcctctgctgccaagccacactgtccctgcaggctctgcagacgccccttccagctttggcagaccctttgtgcccgctcctggtgaacatggggggcccacgcggacttggccaggtggggactgtgaggctcttcgtctttcccctgcctgctgccagcccgggactggctgttttcttgcctttcttctccctccttggctgtgtcatctttttctctatgggagtcaagggtgacaattcagggacgagtgtgaggagtgacaggacacttgtttgtggggttggaccaaggagttccccaatctcaggctgcaccgccatgggctccaggatgctgtggggggaccggggaccttgtgaccagccagaaacggcccaacctctctggaccctggcagggtgtgggtagtggtatagtggagagttttaagctgcgaactgatctcacctgattgatgtttcaaaagaccgcgtgggccgggaacggtggctcacgcctgtaatcccagcactttgggaggccgaagcgggtggatcacttgaggtcaggagtctgagaccagcctggccaacgtggtgaaaccccgtctctactaaaaacacaaaaattagctgggcatggtggcacgtgcttgtaatcccagctactcgggaagctgaggcaggagaatcgcttgaacccaggaggtggaagcggaggttgtggtgagctgagattgtgccgttgcactccagcctgggcaacagagcaagactccatctaaaacataaattaaaaataaaatgaaataaaaacaacaaaaacaaaaaaaagaccatgtggctgttctgtggggaactgatttgagagggggttggaaggaggcaggagcccgaggcgctgtccagttgaggcaccgtgagatgagggaggcagtgcaggtaaggagaggtggtgagatgtgggatgccttgtgatggcggacttgccaggaggattggatgtggaggatgagggatcaagacatcagtgatgactcttgggttttttttttttttttgagacagagtttttgctcttgtcgcccaggctggagtgcagtggtgtgatctcggctcaccgcaacctcctcacagcaacctccgcctcccaggttcaagtgattctcctgtgtcagcctctggagtagctgggattacagacatgtgccaccacgcctggctaatttttgtattattagtagagacggggttttaccgtgttggtcaggctggttttgaactcctgacctcaggtgatccacctgcctcggcctcccaaagtgctgggatgacaggcgtgagccactgcatccagccgactctctgggctttgtcctgagtgtcactgagatggcttttgagggaaagaatgaatgagagttcctgttttggcctctaacttgggaagtttgaggtgcctgtcagacatgcacgtgagatgctgagttggcaaaccttgatggatctgaatttgaatcaggattcattctgggcaagttgcttaaccactctaagtctccaaccctccaggcctccctccccgagtacgtgtgaggcgtatggaaagtgcccagttcagtgccttatacctgcctggcacatcaccagtgcccaacagaggataccttgggacttcctacaacattgcttaatatcatctcatcttccagctcaggaacattcagtggcttccatagcttgaaacttgtgtttggggctgaaacttgggggctgatttggctcatagaatgattacgtttggtccacatagagatttttaaaattttgtgtcatccatgtacaaaaattgggagactcacacaaaaaattggatttctggcttattttgaaaacttcagcaacactgagcttgcctttctgctggacagcttagtgagagataagtaaatagtggccgccccctttggaatggccgtgtgctcttcagtgtaccattgtctcagtctcatgctctttttctcttttaaaaaaattggtgaaatttatataacataaaattaatgatcttaaagtgaacaactcagtggcgtttagtacttttgtgatgtcgtacaaccatcacgtctatctaattccaatttttattttattttatttttgagacggagtcttgctctgtcacccaggctggagtgaagtggtgtgatattggctcactgcaacctccgcctcctgagttcaaacgattctcctgccttagcctcctgagtagctgggatgacaggcactcaccacccacgcctagctaatttttgtatttttagtagagatggggtttcaccatgttggtcaggctggtcttgaactcctgacctcaagtgatctgcccgccttggccacccaaagtgctgggattacaggtgtgaaccaccacacctgacctagttccaaaatatttgatcatccccaaataaaacccctttaagcagttactccccactttctcctccccccaagcccctgacaatcacgaatctgttttctgtctttatagatttacccatcctagatattttatagagattgaattattaggcttctgcacagcaaaggaaacaatcaacagggtggaaaggcagcctacagaatgggaggaaatatttgcaaaccatatatcagataaggggtcagtttttaaaatgtataaggaactcctacagctcaataataaaaaagcctcacctgatttaagaagtgcactataggggtgggtacagtgctcacgcctgtaatcccagcactttgggaggctgaagcaggcagatcatctgaggtcaggagttcaagaccaggctggccaacatggtgaaatcctgtctctactaaaaattagctgggtgtggtggcacacgcctgtaatctcagctgcttgggagcctgaggcaggagaattgcttgaacgtggcaggtggatgaggcagtgagctgagatcgtaccagtgcactccagcctgggtgacagagcaagactctgtctccaaaacaaacaaacaaaaaaaaacaaacaaaaaccaaacaaaaacgtgtactaaagacttgaatagacacttctccaaagaagacatacaagtggtcaacaggtatatgagagggtcgttaatcatcagggaaatgcaaataaaaccacagtgatatatcacctcagacctgttaggatggctagtatcaaaaccacagaagaggccaggcatggtggctcacgcctgtaatcccagcactttgggaggccaaggagggcggaccatgaggtcaggagatcgagaccatcctggccaacatggtgaaaccagtctctactaaaatacaaaaaattagccaggtatggtggtgtccgcccctgtaatcccagctactcaggaggctgaggcaggagaatcgcttgaacccaggagtcagaggttgctatgagccgagattgcgccattgcactctagcctggcgacagagcgagactccgtctcaaaacagcaaaaccaaaaaaaaaaaaaaaaaaaaaaccaaaccacaaaagataacaagcattggtgaggatgtggagaaattggaactcttgtaacactgttggtagaaatgtaaattggtgcagccgctatgggaaacagcacggagattgctcaaaaaattaaaaacattaaaaagagaactaccaacttcattctttgcacgtggatatccagcttttttgcagcgccatttgttgaaaagactattctttccctaggattggtcttggcaatcctgtcaaaacacagttggccatagatgtgtgggtttatctctggactcttaattctactctgtcggttcatatgcctgttattgccaggaccacacggttttgatcactgtagctttatagtaagtattgattgggaaatatgagttctccacctttgaccttcctctttaagaaggttttgagtattctggatggaatttccctatcaaatttaggaggagcttttcagtttcttcaaaacatccagctaggattctgatagagatcgcgttagataggtagatcactttgaatggtactgccaccttaacagtattaaatctccaatccatgaacatggaatgtcgttccatttatttatgtcttctttaatgtcattgggcaatgttttgtagtgcttagtgtgccagccactcggttaaatttgttcctaggtattttattctttttaatgctattttattttttattttttgagacggagtcttgctctgccacccaggctggagtgcagtggcactatctcggctcactgcaagctctgtctcccgggttcacgtcattctcctgcctcagtagctgggattacaggcgcccgccaccacgcccggctgattttttttgtatttttagtagagacgaggtttcactgtgttagccaggatggcctcgatctcctgacttcgtgatccacccgcctcggcctcccaaaatgctgggattataggcgtgagccaccgtgcccagcctaatgctattttaaaatggaattgttttcttaattttctgattgtttattgattgtttattttaatttattatttttattatttttattgtttgtcttttctgattgtgtctctccgattgttcattgctggtgtatagaaacacaactgatttttgtactctgcaattttgcagacttcctttatcagctctagtagattttgtgcatgtgtgaaatctgtgaggtttttttgtgttggaacgtctcatctgacaatagagatagttttactgtttcctttccgtggtagataccttttatttctttgttctggctagaacttttagtacacccaatggtagtggtgaaagtgagtttccttgttttgttgctacttcatcttaaggggaaagcttttagtttttcatcactgagtatgatgttagctatgtctttttttttttaatgccttttatgtcaaggaagttcccttttattcttagttttctgagagtttatatcatgaaaggatattagcttttgtcgtgctctttctgtatcaattgagataatcatgtattttttcttcttcatcctgttaatgtgatacattgattttctttttttttctttattttattattattttttttgagacgagttttgctctttcgcccaggctggagtacagtggcacaatctgggctcactgcaacctctttcccctgggtgcaagcgattctcatgcctcaccctcccgagtagctgggattataggcacgtgccaccacgcctgggtaatttgtgtatattttagtagagacgggctttcaccatgtcggccaggctggtcttgaactcctgacctcaggtgatcctcctgcctcagcctcccaaagtgctgggattacaggtgtgagccaccgtgcccggcctattacattgattttcttgtgttgaactgagtttgcattcctaggataaattccacttggtcatggaatataacagtacgctgttggatttggtttattggtacttcgttgaggatgtctgactctatccataaagatactggcctgtagttttctgtggttcctttgtgtcactttgataacgctggcctcataggatgagttaggaagtgtttcctcctcttctatttttggaagagtgtgagaaggactggtgtgaattcttctgtaagtgtttggtcggcttcactatgaagccatctggccctggactgttctttgttgggaggtttttaattactacggattccatctctttacttctcccatcactcgtttaggttgcttgcctcgtgcctgaagtcattggcatcttctagtcctgtcttagaatttaaatatgagtctgcctaatttaagatgtcctataaaaacccaaccatcttcccacccttccccaccttgccacatctctgctctggtatctctgctgagagatggtccctcccacacagcagcagcattcaacatgatgaaccccataggtcagtggttctcacttgggaacttcttagaaacgcacattctctggccaagaatcagaagctctaggggtggggcctaggaaactttttttatttttgagacagagttttgctccttcgcccaggctggcgtgcagtggcgtgatctcggctcactgcaacctccaccccccgggttcaagtgaatctcctgcctcagcctcccaagtagctgggattataggcgcccgccaccacacctggttcatttttgtatttttagtagaaacagggtttctccatgttggtcaggctggtcttgaacgcctgaccccaggtgatccgcccgccttggcctcccaaagtgttgggattacaggcgtgagccaccgtgcccggccggaaactgtgttttaactagcccccaggtggttctgtggcattagcactgccacacttaacagagagccattgcaggctcctggccccagtgacatagtgaaatggcacctctgaaacgctccagcagcaaaggagccgtgagcatcaggagttggtggaaaaaggagaccagagaagggaaagaggagcaagcaggtggcttggcgggggtggtggggggagacttggttggaacaggacctgattctggaggacggttcattattgggagcacccactgggcatagggttggccatccagggtgaggggtgcagtctgtggtcagagcacagacagctgttaatagcagtaacactggcccgtccagccctgactctagccatcccaacaagcccgccctggccactcccaggccaagactcagccctcaccgcttgcttcgttgcatcttgcttagcagaatatttagtcattcatctggcaaatgtttattgagcatctactgtgtgctaggcagttctattaatagcacagggatatggcaaggatcacagcaaacgaagagctctgccctcgaggaccttctgttctgcagccagcctggtggccggctggttctcatcctgcttgccctgtggatggggacttctggaccggtagcggagtcgggcagtgtggcgtgctcggtggtcagacgacatgggacacatcccatcccgctcccagggcgtgccctgtttccccagctttccagaaacgggtttagagaactctccagaaatccttttccttggtcatgtcttccctcttcatccggatgagaaactcactctgacctgtttgcttctccccccagcactttctggcccgcatctccccccgattttcctgggacccacgtaggtgcaaaacacctgctcctccatccttgtcttctggtaatgtttttagtttgctgttgatgtagccttgtcccctccgtgtgtcctggattggggtgggcgggaataacgaggcgattgcaaggactcattgagcgacctgtgtgccaggctctgtacacgctggcccgtgtggtcctgccacagctctgtgagttagcggtcatgttttcagccccatgcaaaggcgcaagcactcagacagcgtggttctgtgaacatgagtgtgtggtgcctcccaggagcagggattttagcgaggctgctgacacataaacacacccccacctccagaagcagaggagaggagcccagggccagggcaggtagctcagcaaggacccagcatgctgcaggtggggccagtgagagtcacttctccagcgagggtcagagaggagagaggcaagagtgttgcaggggcgagggtctcatgagctggggtgcggcaagagggaaggaacaggtggatgcctgtctgcaggagaagctgtgcctgtgtgtagagctgctgtggaccagggggaggcagggagggcacagggtggtgatgagatggagagaaggggtcctggactcgggtgcaacaagagggaaggaagaggtggctgcctgtctgcaggagaagccgtgtccatgtgtagagctgctgtggaccagggggaggcagggagggcacagggtggtgatgagatggagagaaggggtcctggactcgggtgcaacaagagggaaggaacaggtggctgcctgtctgcaggagaagctgtgcctgtgtgtagagctgctgtggaccagggggaggcagggagggcacagggtggtgagatggagagagggggtcctggactcacacgagtgccatcttttcccgtcgcttcttctgctttgccgcctgggcagtgggctggcacccgaaccggcaagtaggggcattgggaaagatccctcaagatttcccaagcctaaattactccttgtggttcttgttcacgtctgcccctgctacctgggacctcctccagcatcctcctccccaaagacttctctgcctttctgaaggaagaccaggctgtttctgtatcgggaggtggtggggacaggggtggaacttggggcccagacggagttcctcagctgagtgctggctctgcgtggttatctattgactggctgtgaacgcagagtccacggggaaatgctggccgcccctctgatttgggtggcaagagctgctgctgctaatacattagacagctgcatggacgctgctattgatgaggagacccaattacatgcctctgtgaaaatccagcggctggcttcctggtggatggagaccccttccggaggctgtcccgggcaggacgttagtctctggggcaatgccagtgagtcagtgagcattaactgagcacctgctgtgtgccctgagcattaaccgagtgcctgctctatgccctgagcattaactgagtgcctgttgtgtgccctgagcattaactgagtgcctgctgtatgccctgagcattaactgagtgcctgctgtatgccctgagcattaactgagtgcctgctgtgtgccctgagcattaactcagtgcctgctgtatgccctgagcattaactcagtgcctgctgtgtgccctgagcattaactgagtgccttctgtgtgccctgagcgttaactgagtgcctgctatgtgcccttggctgtatgcagccatctcagggtgtgtggatgagggtgtgtccgaaaggctgagctgctgttcccggctggcctgagtcacgctgcttctgggtggaaaaggagactcactccctgccaactgtcccattggaaagtgcagcaagtcgctgagaagtggggccggcccagccaaggccatgctgccactggctgatttctgctgctgggcactgtccatgcagggatcatccacccagcacgttgctcatggctgaggctgaatcatagcccttctcaccaactgtgccagccccaggccatggggcatcttcattcagacccatttcttttcttcttcttcttcttcttcttttttttttgagatggagtcttgctctgttgcccaggctggagtgcagtggcacaatcttgcctcactgcaacctccacctcccaggttcaagtgattctcctgcctcagcctcccaagtagctgagatcacaggcctgtgccaccatgcctggctaagttttgtatttttaatagagacagtttcaccatgttggccaggctggtctcaaactcctggccttaggtgatctgcccacctcggcctcccaaaatgttgggattacaggtgtgagccaatgcgcccagccagactcatttctaacagtcttctaaagacactgtctctgggaagaccaatgaaatcgagaaaaagtatcttgaagctgctagcccacctccaacaggacaaagcatgcttccagagggagctttcccatagctccttctaggagctgctatttactgggcattcactgcagaccagaccctggctgggcacttcttacgcctgttctcacctcatctgcctaagagcgctgaagtcaggaactatttgcttcaatttttttttttttttttttttttgagacagagtcttgctctgtcacccaggctgaagggcaatggtgtgatctcagctcactgcaacctctgcctccaaggctcaagcaattctcctgcctcagcctcccaaatagctgggattacaggtgcccgccaccatgcccagctaatttttgtatttttagtagagatggggtttcatcatgttggccaggctggtcttgaactcctgacctcaagtgatccacccacctcagcctccctaagtgctgggattataggcgtgagccaccgcgcccggcctgcttcaattttcaggtgaggaacttaaaagaggaatgaagagaggttaacatgcctcatgcaacacagctgggcagtagcaggttgcccactccccagacctgggcttcgaccaccgggctctgctgcctcctgtgtgtttctgctgcacctaaacctaaatcactctgcatgaccttgcagccgaagcctgagttctggggttcagcatctctcaggcccaggccccagctttgctctcccatctgatcttcaggatgtctgacccagaggcctccagccagccgggctgatccactaacgcttcactgactgtgtgccgagctgcttctcttttctgtctttgcccattcagttcctgctgcccgagtgccacagtctcctcacccctctctatccagtgatttctcttgatcctttaaggtctgtctgggatcttgtgtcttgcaaaaagccttcgttgacattttggttttaagatgtgtccatgaattctttgatgcttctctcttcaagaggtcgaacttgttgtgtgcggtggctcacacctgtaatcccagcactttgggaggctgaggcgggaggatcgcttgagctcaggagttcaaaaccagcctgggcaacatgatgaaaccctgtttctactaaaaatacaaaaattggctgggtgtggtggcagtgcttgtagtccctgctacttgggaggctggggtgggaggatcgcttgaggccaggagatcgagactgcagtgagctgtgatcatgccactgcacttcagcctgggtgacagaatgagaccctgtctcaaaaacaaacgaaaataaaaagacgtgaaacctaggctgggcgcagtggctcacgcctgtaatcccagcacttggggaggccgaggcaggcggatcatttgaggtcaggagttcaagaccagcctggccaacatggtaaaaccctgtctctactaaaaatacaaagattaactgggtttggtggtgggcgcctgtagtcccaggtacttgggaggctgaggcaggagaatcgcttgaacccaggaggcggaggttgcagtgagccaagattgcgccactgcactccagcctgggcgatagagtgagactgtgtctcagaaaaaataaaataaaataaaataaatactgaaaagcacaaagggaaaaatcatctgtaccttcagcctcattttgttgtgtatcctttgggatatttttctccgtgggggtgatgcatgccctcagatgcagtcctgtgtctctctatacaaacacattctttatgtttcatggaaacaatgggatcatcttgttcaaaactctatttttctcacttagcaatgcactgtgaatctttgcagtagcatcatgagcacagacctcctcttgtcgtttattgtatgagtgtacccctgtgccttatttacttttcctttcacggttgggtacttcccccattgcttagactttttggcccttaaacagtgctgggacaaacatccttgtacatgtgttcttgtggcatggcccggatattgttctagggtaaattccttagagtgggtttcctggaccaaaggacgtggatattttaaacggtttggatacatggtgcctttcggaaagctgtatcaggtgtgcactcagcagagttcctgcagcccggggcctgcagactggacacagtggctgtactgtttctcattcctgccagctatatgttcctgccacatatccttgccaacactggttgatctgatagtgaaagatgttatcttactgtgatcttaatttctttcataactagagaggttgggtttgtttccatgtgttcattggttattttatgtgtgtcctttaatcatttgttcatgtcctttgcacatttttctgttttttttttcttttgagacagtctcactttgtcgctcaggctggagtgcagtggtgggatctcagctcactgcagcctccacctcttgggttcaagtgattctcatgcctcagccttccgagtagctgggattacaggtgtgcgccaccacacccagctaatttttgttatttttagtagagacagggtttcactatgttggccaggctggtctcgaactcctgggctcatgtggtctgcccgcctcagcctcctaaagtgctgggattacaggtgtgagccaccactgcaccagacccctcatttattgatataatggcttttggatagtttgaggtatggtcttccagatcattttctatgaatttatatgcatacattatatacagtatctttttttttttaagagatggagcctcactgtgtcacccagggtagggtacagtgtcatgatcatagctcactgcagccttgaactcctgggctctagcaaccctccttgcctcagcctcctgtgtagctaggattacaggtgtgaaccaccgtgtctggctgtttttataaaattgagattatattcaatgtattgtctctgatttcctccacccctcaacttaatatatcttggagagtgtcatatgtaagcaacatgaatctgttgctgtctttttgaatgattgtatagtttttttgaacagctttattgagatataatttacgtatcataaagtcacccatttaaagtgtacaatttggccgggtacgatggctcacgcttgtcatcccagcacttcgggaggccaaggtgggcagatcacctgaggtcaggagttcaagaccagcctggccaacatggtgaaaccctgtctctaccaaaaatacaaaaattagctgggcatgggggcgcatgcctgtaatcccagctactccggaggctgaggcaggagaatcgcttgaacccaggaggtggaagttgcagtgagctgacatcgcgccattgcactccagcctgggtgaaaagagcgaaactccatttcaaaaaataaaaaataaaataaagtgtacaattcagtggtttttggtggtattcacggagctgtgtaaccaccatcataatcagttttagaacctttttattgctttgaaacgaaatccgtaccttttagctatcaccttccaatcccccatccccctcagcttaagcaagcgctcatcttctttctgtctctatgaggttgcatactctggacatttgattaaaatggaattatggtcctttatctctgacttttgtcttttttaaattttttttgagatggagtctcactttgtcatccaggctggagtgcagtagcgcgatcttggctcactgcaggctccgcctcccgggttcacgccattctcctgcctcagcctcctgagtagctgggattacaggcgcccgccaccatgcccagctaattttttgtatttttagtagagacggggtttcaccgtgttagccaggatggtctcgatctcctgacctcgtgatccgcccgcctcggcctcccaaagtgctgggattacaggcttgagccaccacgcctggccttatgtaagagtttttgtgtggacgtgtattttccattctcttgtgtaggtgtctaggagtggcactgctgggtcatgcgggtacagaggcaggttcttaactgcttttctatacctcctcctgtagtgagggaatttgtcatccatttggttcacatatcagtacttatttatttatttatttatttatttattttacttatttactgagaggcagtcttgctctgttgcccaggctggagtgcaatggtgcgatctctgctcactgcaacctctgcctcccaggttcaagcgattctcctgcctcagcctcccaagtagctcagattacaggtacccgccgccaagcccagctaatttttgtatttttagtagagacggggtttcaccatgttggctaggctggtcttgaactcctgacctcgtgatccgcctgcctcagcctctcagagtgctgggattacaggtgtgagccaccgtacccggccctatctctaccttttttcatttggtgtaatgcactcaagggtcagcagtgttgtggcaggtatcagtatatgttatttttattggctgaatattattccatcgtatggatacagcacattttgtttattcgtcagttgatggacatttgggttgtacccaccgtttggcaagagtgaatactgcagtagtgaatgtttgtgtacaagtatttgcttgagtacctgctttcaattcttttgtgtatattcctgggggtcgaattgctgagttgtgtggtcataattccgtgttgaacatttccgggaattgccaaatgattttccacaatggctgtactgtttgacattcctaccagcaatagatgagggatctgatttctccacagccttgctcacgcctgtgatagtctgtgttttgatcgtggctatgttagtggtatgagtggtgtctcattgtggttttgatttgcatttcctgatgactaatggcttgagtgtcttttcatgtacttattgttcctttgtatgtcttctttgggtatatgtgtatttagatcctttgcccgtttttaaattgagctgtctttttctgactgagttgtaagagtttgtttttgtagagacacgtcctttatcagatatacaatttgcaaatatttcctagcattctgcgggctttcttttgactttcttgagagtaagtatgaggaattcgtattaacttttctttaaacgtttggtagaatttacaaatgaagccacctgggtctgggctttccttcgtgcgtcgtttttttgatcattaatttgatctttttatttgttatatgtctttagattttctatttcttactgagtcagttgtgataggttatgtttttcagggaatttgttcattttatcgaagttatctaatttattgacctatagtttatagtacttgtattttattctgtgagtgtagcttcttttaaccaattttctgcagacttttaagttgtttttatttttttactgttagaaacgatgctgcagtgaacatttgagcctgtctgtctttgtgcacattgcaagtgtgttagaggatggattgttagacgtggaatcgcgtgtcagaggtccgtgtatttaacatgttgattgcttctgttgcattatcctcctcctgttcatctttctatccgtattgattggtataagctctttacgtctgctaatcctggtctcctaagcctggagatggtaagaatgccccgcgtgggtggtgcatgtgcacctgagcaagttggaagaggaggtttggcatctggatgtttggcggctcacttctggtcaagggagttgggcgcgggtgccctaagcccacccctgtacattcacacgtggggtttctagatgccagatcctgaactgctggtaggtcggagctttttgcctctgacacgctggctttggcctgacagaggttgtctggagtcaacagcagggctgggtctctccagggacttcaccaggctccttcccagggcgggtctgggaattctgggagcagtgggagctccaggcagttctggcccatgggtgcctgcagaggtaggaagagtgcttggaggccccacctctgcctgaagaagaaccgaggacactgttcctcatccctgctttcttttctctcgtcttcactggggactgtctgttctgggcactcatgacctcccggcttcgcggtgcccagatgtgggcagtgacattagtctgaggaggagtagctgttttcaggggataggaagtggggtggcctctgtgtgttttgttggggtagagttgccagcccctcacgcttccattccgcttcccttttctcctttttgtttttcctggatacacaagggtggcaccaaagtaggtcaaaggtttggacaagtgcaattgggattttaaaaataacccatctaggctgggcgtggtagctcacgcctgtaatcccagcactttgggaggccaaggcgggaggatcacaaggtcaggagttcgagaccatcctggccaacatagtgaaaccccgtctctactaaaaatacaaaaaattagccgggcacgatggcgggcgcctgtagttccagctactcgggaggctgaggcaggagaatggcgtgaacccgggaggcggaggttgcagtgagccgagattgcgccactgcactccagcctgggtgacagagcgagactctgtctcaaaaaaaaaaaaaaagaaaaaaaaaatccctctaggcccctggaggcctcggttcaatggtgttcaggctttgcttcaccagctttagggtgccagagtggtgccttgtgggcaggggaccgggcaggcagaggcagaggtggcatagcgggccctccccctccttccctggctgctgtggccacagcgaccctgctttcaccggttggttttctgtatcagggtgtggaacgccgcttgtgttggacaccttggccccactgttgggttgaaaacatcctaaatatggctcctgccggaggctgaatgccgaggacgataggcgtttgcagaatttggctcttcccaggggccggcaggcccctttccttgacagaggctgagtgtctgctcccccagcaccattcatttgccagcccaggtgtgccttagcctctctcctgttgtatggggtgtttggccctctagccctgcaaaggcaaaatcaaattatcttctctgttgatccaaatgaattttgtccctggggaagccccaggctcagcttcctgatagttggtgaggaagaggcttttgctgtggacctcccggctgatccctgtctttctgtccccctgcttttgtctttcagtcgtcggagttctttgagatgctggagaaaatgcaggtgagtacgtacccccaccgtggcggggaagaagcccagccccagatgtgggtggcatagggaccaggcagaacccacgggcagaagccgggtgccctggacgggggtgcagagaagagacaattgcatccccttggcccagacaacctgaggccattttgctgttgaggggtacggagcactttgggaagactcctgcggagggacagggaggataaaagcagaacttccccagcagggcagctggggaggccataagccctgtggatgtggaggagggtttgaagggtccattgttcctagcacgagctggaaagaaggcctgaaagaactagctgcttcttggaggagtcatcttgcatagggaggcagaggggtggggtgggaggctggcttgtgttcaagtcctgcaccagacacttactagcaccagttcctttcctgtgctaagcctccataaataaataagaatgaatgcacccacttacatggtggttggggtgaaatgagataatcggtgtaaatacttggtagacactacataaaagttggtgtgtgatgtgggtttgggggttcttcgttgttcctcaccagggtcagggctcccaggtaagagctgctgccctggggagtatgtgcagaggcccggcagggttcattgacgtgggcgggaagactgggaagacaatgctgataatacacctgtagctcaagcacttcactgggctcagagattgacaggcgtcatttcttcctgctaaggccttcagaagtaggcatattattattattattatccccataggacaggtgagaaaatcgaggcacagaacaattaaaggcagcactcaaagggtgcgtggctcataagtagcttcagagccagagagtccagccattatgtcatgatgctttttaccataagtaggtgctccaggctcaagggaggaagattctgcaataatggtctggaagtcctaggaggaggggcaaatacagcacccacggcagtcctgagatgtgggccaagcagccaggtgtccctgagggtggggagggaggggagacgctgtttgaagggaaagtattgttactgccgtgtcaccgagagccagttattaaaattgtcctctgcgcccagcagcgtgtagatgacagactcatcttctacgcatttagggaacttatcatcagcttgcggaaaccaggctggcatgtgcctcacagtgaggggtgggagatggtatataatcaagtgctccattgcttggagcaaagctgggattttcgcctctagtcagtgggatcctggcactctgggaagctggcagggggtttgcagcccacccagccttctctccggttgctcctcagatcctctcttccttctcccccagctggagtccccttcccacaactttgccccacacagggtctctctgagcacagcattcagccccagttaaccagcctcagagtgttgtgttgtgtagaggctgcagggcttgtctgttcatgtagatcgggtgctttctagggtaggggtcttgttttattctccctctgtctgtgcaatggctgatccccctgggtagcgtgcctgttccctttcagttgagactgttgaagccaaatttctgggtgtttaagtccctaccatgtgccccctgggcccagcctcagagggttcactcttagtaagaagctcacgtatggggcactgctggccatggagtgcccgcgtgggccttgagcctgggctccatctctcttcatcttgcacgtgtggaaactgaagctcagagcagtgaagcgcccgggtcacttagctagttgtgaagagctgaaactggaatccgggattcccgatacctagcccaagagtctgggaactgggagaaggcagaagctttggattccttcagtcctgggttcaggttctaaccctgacgctttctagctgagtatcttcagtcaagtcggtttccccttctgagccttaatttcttcactgaggggagaaggggaaataaagataatacccattgtggccagttgcggtgtctcacacctgtcatcccagcacttgggaggtcgaggcaggtggatcgcctgaggtcaggagttcgagaccagcctggccaacctggtgaaaccctgtctctactaaaaatagaaaaattagctgggtgtggtggcacacgcctgtaatcccagctacttgggaggctgaggcaggggaatctcttgaacccgggaggtggaggctgcagtgagccgagattgcgccactgcattcagcctggatggcagagcaagactccatctcaaaaaaaaaaaaaaaaaacaacaaaaaaagacaatacctctagcaaaatagcacatggaggagagagggccccgtgctgggcagtggctctgcggtaggttattaggggagggagtggcgtggggaggggatgggaggaagtttgctctcctgccctcggggctgttcccagacagggatgactaatgcaggccaaacaaaacagactcctgccctcactgcccccacccgccatctgcccagtttgccagctgggacagggtctgtagggccacccaggtggctttgtgtgtgtgtgaggggagcgcctgttcagtgggaacggccctcccacgccctcctgaacaatgctgcaaggcgactcagcccagggaagtccgcagaggctgcatgtcaatccacccagttaacaggagccctgctgtccacagagtgtggggtacgtcacgcgcttggtgagccggtgacccggcttcaaatctaggccctgccactcactggctgtgtgaccttaggcaagcagcctccttctggggccccagtgtcctcgctggtggaaagtgctgtgagtttcaaaggaggccacagagagagctagcttgggaaggtcaaaatccctgtgcattagtgttgtgaccaggcagacgctgcttctggactccttctgcttcagaggggacctgtttcttctagtttgtgtaccgtctcatactgtcacccgattttctcagatagtcttggaaacaccacgtgttcccctcctgcacaacacggttaagtcagaactcagtgatagaactgctggaccagggccaggcgcagtggctcacgcctgtaatcccagcactttgggaggctgaggcgggtggatcacctgaggttgggagttcaagaccagcctgggcaacatggtgaaaccccatctctactaaaaatgcaaaaaactagctgggcatggtggcacatgcctgtaatcccagttacttgggaggctgaggcaggagaatcacttgaacgcgggaggtggaggttgcagtgaaccgagatcccaccactgcactccagcctgggcaacaagaatgaaactccatctcaaaaaaaaaagaagaggctgggtgcagtggctcacgcctataatcccagcactttgggaagccaaggcgggtggatcacctgaggtcaggagttcgagaccagcctggccaacatggtgaaacctcgtctctactaaaaatacaaacattagctgggcgtggtggtacatgcctgtaatctcagctactcgggaggccgaggcaggagaattgcttgaacctgggaggtggaggttgcagtaagccgagatcataccactgcactccagcctgggcaatagagagagactccgtctcaaaaacaaaaacaaacaaacaaacaaaactgttggacagggcactgctccccagaagtgaattcttcagatacctgtagataaactcccttagtccagtcccaggcatcatatctgatccttgcagtcatccttccattagtgagatgaaaggtgagcgtctaatcctcattttacagatgacactgggggctccaagaagctacgctttgtcaagggtcacaaatagtaagttcgcagcagaatgagggccagcaccaggcctcctgcctgtcccttgaaggcctgttggcgtgggctctagagcgctggctccgacaccaacaggcatgacttcctatgtttcccttcccttactggctctgtgaccctaaggattttttttttttttttttttttttaatttgagacggagtttcgctcttgttgcccaggctgaagtgcaatggcgcgatctcggctcactgcaacctctgcctcccgggttcaagcaattctaccgcctcagcctcctgagtagctgggattacaggcatgcgccaccacgcccagctaattttgtatttttagtagagacagggtttctccatgttggtcaggctggtcctgagctcctgacctcaggtaatctgcccgtcttggcctcccaaagtgctgcgattacaggcgtgagccactgtgtccgacaagacagctatttaagctttgaatgataataccgcctccttcatgatgataatgacccacagcatttattatataccagtcagtgttccaagtgctcaacccattgttaacctttaaccttcaccaccatagtcgatgccatcatcattcccattttacagatgagaacattgagtcacagagaggtttctgtgacttgccaaggtcatcaggctgataggtggcagtgttgggatttgaaccccggcgatctggctcaagtctatgctgttagcccagcggcgctgttgcctcacctgaggctgctgtgaggcccgcccctggccaggtgtgatgtgtgcaggcccagcacgggccagcttttgctgctgctcctgttactaaccccctgtaaggccaggtgctctttatctggccctgtcttctgacctttgcttttctgtggatcctgttttccttgtttctataggggatcaagcttgaagagcagaagccgggaccccagaagaacaaggtgggctgggtgggtgagggggtggccagacggccctggtgaggggctagggcgagaggaaggcaggaggggctgccgggatgctggggtcttctgtctcacacctgtctaactctgactcgcaccacgggccgcttcacgactgccttgttagaccagtgcacggtgggcagcagaggggtcctggcttgatgccttaggacagcttcagagcaggctgggggtggaggcctcggtgggacctcaggcttggccgtttggcccggctcttccctaccctgtgcagtgtgtaagggtgtcaggctctgtgccccgggttccagtgggcagtcagctctcagcttcccaacccaggggtgccgcttatcacttggaggtcagtccgcctgcctggaaaggggtgctgggggagactaggggtcattttccggaatgagcgttctaggatgagaagctggtatcacgaggggtgagaagttcagcaccttcggacactgcatcatcagctggcagggtttatgtttgggttctgtcagtttggagaagaacatgggggatgttagattccagagctgattctgagctgttcttccatcgaatgttcctccctcaaagcccccccacaacatatcccccttgcaagacctggaaacagtggtcagactttacgggcactgccgggactaacggtggcatcatctggtttgtcttgcaggacgactatatcccataccccagcatcgacgaggtaggtgccctcccctcactcccacctgccctgcagcctgctctgggtcccgtccctggggaaatgatggcgatggcctgtgcccagccccccaggggagagaaccttgggcctgggacctctcttcctgtctttgcctttgtaacctcagcttctccatgtgttaagttgggggtgctcatctaggcctttcagccctggggctacagggttggcgaatgaagctggaggtgttgtggggcttggaggaggggttcatgtcactgcctttggcctcaagtaccagtgggtaccaggccccactcctgggagcagcgcagaggggacaccgccaccggccccctccctcccctgcggtcccaggggagcgcacgaccctccctctgccttcaggttgtggagaagggaggcccgtaccctcaggtcatcctgccacagtttgggggctattggatcgaggacccggagaacgtgggcaccccaacatcgctggggagcagcatctgtgaggaggaggaagaggacaacctcagccccaacacatttggctacaagctcgagtgcaagggtgaagccagggcctaccggaggcacttcctggggaaggtgaggctgggggagaggagctgctgggggttgggggcagaggctggggacgctgggagagaggaggtaccaggcggtaggggatggggagaggttgagggaggctgtgggaggctgtgggagaggagctgccaggggtgggggtgaggctgggagaggctgtgggagaggagctgccggggatgggggtgaggctgggggaggctgtgggagaggagctgcggggggtgggggtgaggctgggggaggcttgggggacagaggagctggcgggggtggggggaggggctgggggccctgggggagaggagctggcgggggtgggggtagggcagagtgccccccttttccttggcctcttacctccttcctagtctgtccttttgttgctgcctgctgctgtcttagttggagaggtctgagggcctctgtcctgggataggggacggggcaggggagccatgtaacaatcagggaggcccagtgccatgagtccttgtggggaccaccccccgcaaatgtttcgggaggcgatggaatgggtagtgtttggggtgaaggacggtggctggagttttgactgttcgaggaaaaatgtgttctcacacctcaagaagtctctgtttccatctaaatcacgcaaatctctccgtcctcattcaggcagatcctctgagtgcttgtactgcatagtgtctgcgagcctctgattgcttaaaagtgacaaagttaaatttaaaagaatagattctgcccttcagatttaccaggttcttgatgtactgagggcagattccggaaatctgtagcctgaggccgctttgcagagtctcacgtgacgggaggctgcctcagagcccctgggtcttgttagcatgcagattccagggcctcagtctgatccagcaggtctggggagctgtgtttttcgcccgtgttccccgagccagggagtgacccactggctcaggacacctcccagctcccctgggtggaggtgccagggttcctccttgctgtcttgccccagatagtgtgaactggtgagggccgccccatgggaatgagaatgtggactcggtatcttgtggttaagaacttgcccttcagagtcaagacagctgtgcgtttgaaccctggatctgtcccttactcatcgtgtcatcctgggcagtgacttaaccccccgaccattggttttcccatctgtgaaatggggatgatgttctctcccggatacagctgtggtcaggactgaaggagatagtgggtattaagcccctggcacggtgcctggcgcctcctgaggatccggccgtcggtacctgttaatgtcgttgtcattgtcatcagtagcatccttctcttccttgttgctgtggggcttctcctggtgaaggaggtggtttagggggaacatacctggaaggtttcttcctccttcctgctcacactcagtttctttttttaggatcatctaaacttttactgtaccggcagcagcctggggaacttgatcctgtccgtcaagtgcgaggaagcagaggggatcgagtacctccgggtcatccttaggtagggctgttgcgctgcttgaggccacttctcttccaggcagggctctcatcggtggtgtgggggctgggatgggactcagaaataccagactgaccagtctggtctgggtgcactggctgacggggacaggcctgctggaatcctggggctgtgtctgaagttgcctagcagggagacccacgcgctccaccagttagctgacagtcagaggggcatccaggtctcaaggtcacccagactgtaccccttcctgcccctctttcttacaagtccatggctctgaggaagacgggaagaaaagtagggatggttcagtgtgactcatcctgctgagacacagctccgagtcctgggagagggttcgccagagtgctgcctgtggtatacatcttgccaggaaagatagtgccctgtgtgtttgttgtatgggctgggttccctgagatgcactgatgttcacaacaggagcactgatttatagcggaagccagggcacctctctctggattgtgaccttctcaagggcaggagctggaactggtttctgtttggtttagctaacatgttttgtaaaacctcctctgtaccaggaactgcgataggtgttagagataccatgatggctgagacttggtccctgttctctgaaaggcatatggtttcatgaatttaatgtgtgtcacgggtatgattttagcaatatgcacaggttgctatgggggcacgaaggaatctgtgtcttatttatctctgtccctggttgggtggtgcttagcagaatgctgtgaacctgtcaggctctcaatccttatttgtggagtctaattgaagattcataaaggtatttggaaaagagcaatcacatttttttttcctgcccaaattttgagataaatattggagggaataaggacatataaccccactttgggaaaggtgggggtccgtggtttcaggatgtcgtcagcacccatccaatcttagtttgtttcttatcaagaaaggaagcaattttctctacagaggttcacttggctggaaatcatatttgcaaggcatagaagagtcaattaaatagcaagagccaattttctgagaggttaatacctggatctccatctccaaataggatttccagctaggtgaacctctgtgaagaaaattgctaccttaataaaaatcagaccgagactgggtagcatttttgaataagatgacaatggaatacaaagatctaaccccctttttctaatactgtatcctccattaggactggaaatgctgcttcggggctgaaagctaagaaaaatgccgggcacgcaacacgcactttgatggttttttgtttttgttttgtaatctatgggggcagttaggactaaaagtaggtgaatattgagagttgaaccccagattctcttccttagaaagcagtgttgtggccaggcacggtggctcacgcctgtaatcccaggactttgggaggtcaaggcgggtggatcacgaggtcaggagatcgagaccatcctggctaacacggtgaaaccccgtctctactaaaaatacaaaaaaaaattagctgggcgtggtggcgggtgcctgtagtcccagctactcaggaggctgaggcaggagaatcacctgaacccaggaagcagaggttgcagtgagcaaggatcgcaccactgcactccagcctgggcgacagagtgagactctgtctcaacaacaacaacgatgacaacaacaacgacgacaacaacaaaaagcaatgtcgtatgggaatatatgaagttggagatctagaagaatcctgtcctctttaggagtgagagtgagccctggaatagacagggatctttccacatagaattatttttgttgttgtgggtcaacagcattgaaatcaatgccccaggaagcccagcaagctcaaatgtggctctcccagatggaaagctagtaggtagggtggtgacgagaagccgtaccccagctcggaagttgggcagtcacatcatgtacttggagtgattgccaggccaaattggaaaccagacataagaaattggctccacggtttagcagctttgccagacacaaagaagaaattatccagagatgaaattcccctgctggcggtgactactgtccaaacttcttcctcattccccataggcttctggattttttaacggatgtcccaaatttataacaagcagctctccagtctaagatctaagtattctaacagcctgtgtgtgccatgagagtagccaagaagaatctacccacagtttggagacaatgagcctgtgtagatttcttctgtttcaagtttggatataaagaagaagaagttttatgggtttgtaaaagaagagattctgcctctaaaaaagcataaactagttagagaataacagagttttgaaaagtatttacttttacagaaagccaggtgaatttgagagatttattaactttgaattttccacaaacctctagaaaaaatacacactaagaaagaaaagatagagtgagccaacagaatgggaggaaacagttgctggttaagttagggagataataaaataaaaatggacaaaaagaattttaaatagtatatgaaacagtacaaagcagaatctactttgtagaaaatccagttattaatatggggaacaagcttaagaaactctcacataattcaaaggaaacacaactttaaaatgatgagtgagatgatgatgaatatggagggtagtgagcaggaattacacatatggataattgatgttgtcaagctgattgaagacttaaatctgaaaatcaaaatgactcacccattaacagacaaaatcaatgaaaggaaactaattgctggatgtactttgatgaaaatttagtatttcatagatataaagttactagtagtagaatggaagcattccaaatagtaagagaagacaaagaaaacacactttgtctgtagaaaaagaaaacaaaggaataataaagaaatatgatagaagtgtgcgtacatatgtgatgataataaatataaatgacttaaattcgattgttaacaaagattctcgatttgggtcatctctccaaaaaacctacacaaattgatctatattttattaaagaaagtaactcagaatatttgaaaattgttaagaaaaaaattagaaaagtcaaatacaaaaagaaagcgggattggcaatattaatatagaaaagtagaattcaaggcaaaaaagcaatcagtgtgataaagagggctattatccatcttttcataaaaggtaaaatcaataatgatattttatattgtcagtagtatatattatagtatatgtatatgtacacatgtatgtaatgattatggaaaaattcacagaatacaattgtaatggtagatttttaacacacatcacttgacatatcaatactagggttagaaatgacatttattcatctcaatatcaattatatacatatttttctttatctatctatctatctatatatatatatatctgtttctgtatctaactatcagactttgatcctctaacagattttacttcttttcaattgcctttggaatatttacacaaattgattgcatagtagatcagtggttttctgtggacctgctacatcagaatcattttggatctttaaaacaaagtaaaacaaagcaaaaacaaacaaaaaagcccaacaaacaaaaaccaaaacctagacttctaggctccaacccaaccatttgaaacacacacacacacacaataaataaataaataagatatgtaaagatgtgtaaatatatatattctttttttttttttttttttttttgagatggagtcttgctctgttgcccaggttggagtgcagtggtgcaatcttggtttattgcaacctgcaactcccaggttcaagcaattgtcctgcctcagcctcccaagtagctgggactacaggctcatgccaccacacctggctaatttttttgtattttcagtagagatggggtttcgctgtgttggccaggcttgtcccgaactcctgacctcaggtgatctgccctcctctgcctcccaaagtgctgggattacaggcgtgagtcaccgcgtctggcctaaatatatatattcttatttccttccttatttccacaggattctgtagaattctgtaacttgcttctcttaacaatgtatcttagagatttttccgtattagcatatagagaatgtcttaatttattttactgctggatggtattccattgcatggatgtgaaataatttatttaatacatcccctgggccgggcatcgtggttcacgcctgtaatctcagcactttgggaggccaaagcagatggctcacctgaggtcaggagtttaagaccagcctggctaacatggcaaaaccctgtctctactaaaaatacaaaaattagccgggcgtggtgacatgcacctgtaaccctagctactcgggaggctgaggcaggagaatcacttgaacccgggatgcgcaggttgcagtgagccgatttggcgccactgcacttcggcctgggcgacagagtgagactctgtctcaaaaaaaaaaaaaaaaaaaaaaataataataatacgtcccttgttaatgaccattgccaatattttggtaacacaataatgattaaatgaataaccttgtgcagactcagtttttatggattatgatagtttctcagatgagatagctaggttaaaacataaatgcatttgtattttgatagataacgttaaattgccctctgtaggggctgtgtaaattccaactttcaccagtaatgtatcaaagtgcttcttattccaaagcctcttcagtagaatgtattgtcaaacacttggatttttgcccgtctgatagatgagaatagtatttagtgttgtttaaatttataatcttaatatgaatcatgttggacatctcttcatatatttaagaactgcctctatttatttgctatgaacagtttataagctttgcttctttttaaattgggctgttatttaagattctattttttaaaatcttggctaggcacagtggctcatgcctataatcctagcactttgggaggctgaggcgggaggatcacttgagcccaggagttcaagaccagcctgggcaacacagggtgaccccatctcttaaaaaaaaaattagctgggtgaagtggcacacacctgtggtcccagctactcaggaggctgaggcaggaggattgcttgagcctgggaggtcgaggctacaatgagccatgattgtgccactgcactacagcctgggtgacagaacaagaccctgtttttaaataaataaactaaatcaatcaatccatcaatcagtcgacctatgtaactaacttacttgtaggtaattatcgatagcagctataattaggaacttctgaaccacaaagtaaaactaaatacatttcagagagcaagctctctgctggatgtattcacttacaatttgatgataaaactagcaattaataacaaaataatgatttaaaaaaaccactaaaccactgagaagtaaacaatcccaatactttcttaagtagcttttaggccaaagggaatagaagctgcagttacagaatatttataaagtaatgacatttataatactatacataaaacctatgggttgtattcaaagcaatacttagaaaaaaatttattaccttaaatggtttcctattaaataagaaaaagaactggcaggtgtgttggctcatgcctgtaatcccagcgttttgggcggctgaggcaggagggtcacttgagcccaggagttcgagaccagcctgaacaatagaatggacctcatctttacaaaaataaaaataataataatacagtaaaataaaaataagagtgatatttgcaagttgttattattgttagcaacttctctgtgtctcattttcctcatctgtgaaatgatgatggtagcatgtaccttgaaattattgagtgcttacatgtcctggtgagtgaggaccttacatgctgcagctgctcagtaatggtggctattattattatcaatattgttacctaaagaaagccagaggaaggaattcacaaagattaaagcagaaataaataaactagaaataaaaataatttgagacttgataaacctaggtttcttttggaagaagcaataagataggtaactagctagtcgaatatagatgagaagagaaaataagaatatacaaaattagtcataaaaagatgcatgaccacagatgtgaagaagattaaatgattactaatggatgctgtgttcaactcatgctattaaattgcttctgtttctaattttatttgaaattttatttgaaacagatgcctttctaggaaagtatgccaaatgtaacttaagatgaggtaaaaaagaaacctgaacaaaccggtaactgtggaagaaattgaaaaagttctcaaagaattatctcttcaaatgtttctagatctagatggtcttgcaggaaggtgttttaaactttaaaggagcagattttatgttatttaaactgttcaagagaaaagaaaaaaaaatatggaaagcttcccaattaataatgcttaaaagagctttatgggctgggcacggtggctcacgcctgtaatcccagcactttgggaggccaaggcgagtggatcacctgaggtcaggagttcacgaccaacatgagtgaaacctgaaatgagcctggccaacatggtgaaaccctgtctctactaataatacaaaaaaattagctgggcgtggtggtgcacacctgtaattgcagtgagccgagcttgtgccattgcactacagcctgggtgacaagagtgaaagtccttctcaaaaaaaaaaaaaaaaaaaaaggatctttttgaataaaatcagtcaaatgagatgcaaaaaaagggtaggggccaatattccttacgaatgtagaaatcaatgttgtaaataaaatagcagccccagaaactcaaatctaaatagactaataagagtaattcactatagccaagaaagagttattttaccaatgcaggatggttaatattaggaaattcattcagtgtttgtttacccaaggcttaatatatgccggactttgtctggttgtagagatactgtgaggaatgagttcttgctacttgcccatagaaggcattcagtccaaatgcactgcgttttagagattcttgtttctgttctcggtcttactcatcatcttcttcttagggacagggatcattataggctagtgaggctgatgggagacgtaggtggtgagggagaactgaaggcaatgtggagggtgtgtctgagtgtgtgtagggttgataaatgatgctagagaagtaagaaaaggctagatcctgtaccagtgatgtttaggagctcagattttatcctaagagtcataggagaggtactgaagggagaaggtcatgatcagatttgcacagtagaatgatcactctggcgccgggcgtggtggctcactcctgtaatcccagcactttgggtggccaaggcaggtggatcacctgaggtcaggagttcgagaccaggctggccaatgtggcgaaaccctgtctctactaaaaatacaaaaactagccaggcgtggtggtgggtgcctgtaatcccagttacacaggaggctgaggcaggagaatcccttgaacctgagaagtggaggttgcagtgagccgagatcacaccactgcactccagcctgggtcacaagagcaagaatccttctcaacaaacaaaaggaaaacagtaaaattgttggaactcaagaaataattgtagaaataaacaacaacatgggataaaatctagtctgtttaaataatgaatttatgaattggaagatagacccaaggaattcctccagaacacagcacagatcaagagatgaagtatatgaaaaagaagatatgtggataatagactgggaggccccagcatgtgtcataaagacgttccggaaggaaagaataaactagtgaacaaatatccacaaaaatattagatgagaatgtttcagaattgaagaaaccacacaccgtgctgctgaaagtgatttaaaaacaaaacaatacttctagacatgctgaagtgaaacatcagaaataaaagattttaaaaatttaaaagaattttaaaagctgtctgaggatacagacaagataatctatgatctaatgagaactaggatgaaaatagatttctccctatccatgatagttgttaaagacaatggggcaatatctttcaagtgtttaaaaaaagaaagaaggggccgggcgtggtgtctcatgcctgtaatcccagcaccttgggaggccaaggcgggcggatcacgaggtcaggagatcgagaccatcctggctaatacggtgaaaccctgtctctactaaaaatacaaaaaaaaaaaaaattagctgggcgcagtggcaggcgcctgtagtcccagctacttgggaggctgaggcaggagaatggcgtgaacccaggaggcggagcttgtagtgagccgagatagcgccactgcactctggcctgggcgaaagagcgagattccatctcaaaaaaaaaaaagaaggaaaataaccctcaacctaaaattctatacctagaaaagccaaagacaaaataaaactgctttcagacataaaaaaatggagggaatgtcccactcgggctctttctgaaagaattactgaaggatacacttcagtcaaaagaaaagaaaaaccagaaaagatttaattagaaagtgacaagaaatagataaaatatgttgataaatttaattactgatggtaaaaagtgggatttttttttttgcatgtttaaaaggaggcttgaactaaatttataaacaaaagtagcaaggacaatgggaaggaaaaaatgttcagtggataaaagcatactctgttgttgcttatttgtgcccctcaggagagagaatacaatcttagagtttgatgaaaaaaatataaataggtgtattggaagatacagaaatacagtctatagcaaattagtaggagataaaaggaggattaacaaaaagaaagcaaaaaacaaaacatcaattgaaggtaggaaaggaagagaaaaaaaggaaagaaaacacagggaacagaaaatataaaatgatggtttagaaataatttcaggccagtcacggtagctcacgcctgtaatccccacactttgggaagccaaggtggatggatcacctgaggtcaggagtttgagactagcctggccaacatggcgaaaccccatttctactaaaaatacaaaaaattagctgggcgtagtggcatgtgcctgtattcccagctactcaggaggctgaggcaggagaatcacttggacctgggaggcagaggttgcagtgagctgaaattgcgccacaatactactccagcaggtgacagagcaagactgcgtctcaaaaaaaagaaaaagaaaaagaaaaagtttcaaatatgatagtaattgcaataagtataaatagattaaattagcctattacaataccagcctatcaaattgaattaaaaatatagctatattctgcttataagagacatacctaaagaaaaatggtgtggaaagatttaaaataaaggaatggaaaaagatatgctgggaaagtaccatgaacgttggtatagcaatagtaatatcagacaaaatagaatttcaggacaaaaagactagggataatgtactcctttgtaacctggaatacttcttccccactcctgatgtttcctgtggctagagggaatactttggtgtaacacccgggctctcttcaccctccctgatgggcgtgtttgggagcaggaactcacgtgtgtagctgtgttccttcccccttttcctcttggacagagctgccctgagggtggtctcctgtgcagttaagtctcacctgagcagctccatgggagggggcttgcccctggcccgcactgcctgtgactgggtgggtaagttgggctgattctggtatttagttagacccgtttcatcttcacactaagccgtgtgctcccacgtggtggagtgattttgactccgaacaccttactctgttgtttgtttgcttttgaatttgttcagaaactgggcagggaaagagtcctttttctaggtcccccagaggccttggcctgtgtgattataaagagggcacgttctgtttttcatcaccctgatgttccgtgaacacgctctgttcacccggaatatctaacagtcattaacttgtacttaataacgtcgtcttgaattttaaaaagcaaaactgagagaaatagaaggagaagtggataaacactgagttatagtgggagattttgacaacattgctgagaacccggtggattgagcaggcaaaaaattgtgaggctatggaagacttgaaagatacagttaacaaatttgatcttggctaacatgtattcttgctcttagcaaaagaaaaaaatacattttttcaagctcacatggagtggcaaaaagtaaaagtccatgtattaaagtcaacacatttcaaataatatcatttagattgtgttccttgaatataagacaaattatcaacaattaaaatactggaggggaaaaaatctcatatttggaaagttaaaaactttaaaaaatgactaatggactaaagaggaaatcacaaaagaactgacaaaatatttagaactaaatgacagtgaagatactgtgtatcaaattgtgtgggctgcagttgaagtggtatttagagagagatgtatagttctaaatgcactttaaaaaaagattaaatgagtaagtatgtaggtcaggaagctggaaaaagagtagttgaaaaaactctgaagaaaatagaaggaaggaaataaaaaagacaagaaccgactagtgaaataggaagcaaaaataaaaaaggatagagatggtaaaagaaaaaactcagtcttactagatcttactagtctttcaaaagactagtaagatcgataaacctccagctaaaactgataagggaaaacaaggaaaagatacaaacaggccaggtgtggtggctcacgcctgtaatcccagcactttgggaggctgaggcgggtggatcacctgaggtcagaagttcaagaccagcctggccaacatggtgaaatcctgtctctactaaaaatacaaaaaaattagtcaggcgagttggcgggcacctgtaattccagctactcgggaggcggaggcaggagaatcacttgaacctgggaggcggaggttgcagtgagccgagatccagcctgggcaacaagaatgaaactccatctcaaaaaaaaaaaaaagaaaaaaagaaaagaaaagatacaaatagtattacagcagtaaaggtgaggacgcagttagaaacaaagatgaagtcttcagagaataccaaaaacaactttgtatcaatgtgcttaatgaatgcttttatataaacatataaatttccaaaattgactcaataaggagtagaaaacctaaacattcaccactaaagaatttgaattagtacgcaaaagtatcctcctataaaaacagcaggcccagagatgtcacagactagttttagcaaacctttaaggaatgagaaaatctctttattatacaaactatttcaaaggatcaagctgggcgtggtggctcacatctgtaatcccagcactttgggaggccaaggtgggtggatcacttgaggtcaggagttggagaccagcctggccaacatggtgaaacctcgtctctactaaaaatataaaaattagctgggcgtggtggcgcatgcctgtaatcccagctactcgggaggctgaggcaggagaattgcttgaacccgggaggcagaggttgcagtgagccgagattgtaccaccgcactccagcctgggcgacagagtgagagactccgtcttaaaaaaaaaaaaaaaaaaaaaaaaaagatgagaagcaacccagcaattttataagactggaataacaccttgatatcaaaacctggcaagggaagcacaagaaaataaaaaataggccagtgttgcttttgaacagagctgtgaaaatctaaataaaatacagtagtctcctcatattcatgggggaaatattccaagacccccagtggatgcccaaaatgtcagatagtcccaaacctgattgccgtcaatggaaacacatctgtttatatctttcacccacacatgtcatcctcttttcaccttaactaagcatttatgcactgtgggcataacttttgcagtttgaggtccaacagcaaaactagcaataatttctttttccttcttcacaatttcacacatagaaaattcatccgtaccatggatctcagcaaccttagcatagaatttttttctttccttattaagaactttcacctttcgacttaaaggaggcacttaacagtttctctttgtcatatccaaagtgccagcctcactcatgggccttgtactttggggccgttattagtatgataaggatgagggtggcttgaacacaggcggtgagatactgcaacagtccctccgatcactgagatggctgataagtgactgatgggtagggagcgtgtagggcgtgggtatgctggacaaagggaaaattcatgtcccgggtggatagagtgggatggtggaagatttcatcatgctattcaggacggcacaaaattgaaaacttatgaattatttctggaattttccatgtaatatttttttggccgtggttgactgcaggtagctgaaactggggaaagcaaaaccgtggataagggggactgctgtattaataaattgacttcggccgggtgctgtggctcacccctgtaatcccagcactttgggaggcggaggtgggtgggtcacctgaggtcaggaattcgagaccagcctggccaacatagtgaaaccctgtctctactaaaaatataaaaaattagctaggcatggtggcaagcaccagtaatcccagctacttgggagcctaaggcgggagaatctcttgaaaccgggaggcggaggttgtagtgagccgagatcacgccattgcactccagcctgggcaacaagagcgaaactctgtctcaaataaataaataaataaataggcaacaagagcgaaactctgtctcaaatagataaataaataaaaaaaataaaaaaattcaggatattaaaaataatatgtcagaagtaagtggagtttttacccatggaatcaaaaaacggctcaacagaaatgtaattcaccaggtcaacagattaaaaaccatatggttatctcctcagatgcagaaaagcattcagtaaaatccagcattttcataatgtgctgaatgaatcaggggatcaggctaaatttagaccctcatggtgaatccctttatgaagcagattccatcccatttatattttgagtaagcccagattttgaaatactaggttttcttttcataaaggtttaatttcatgacgaaacccaaatatatccagaagctgtgctcagttctttgggagaacacaaaaacctccaaacaaaccaaaaaataatggcatccttatttgcatttcccgtatttcagtggcagacagatatatcaggcgtgttctgttttttttttttttttttttttttgagacagagtcttgctctgtcacccaggctgaagtgcagtggcacaatctcggctcactgcaacccccacttcctgggttcaagcgattctcctgcctcagcctcccaagtagctgggattacaggcacccaccaccgcgcccagctaatttttgtatttttagtagagacggggtttcaccatattggccaggctggtctcgaactcctgacctcgtgatccaccctctttggcttcccaaagtgctgggattacaggcatgagccactgcccccagccaggtgtgttctttaagtagccacctccccagcatgcctaagtaggattccgttttcccacaaggcaagtgtgatgtgtggttgggccacctgaggccgatctggcctcagagaatcctgaagccagtgtcctatgtgctgtgatctcggccaccttcctcttggactgtttctttccttttcttcttttttttgaggtggagtctcactcttgttgcccaggctggagtgcagtggtacaatctcgactcactgcaacctccgtctcccgggttcaagcgattctcctgccttagcctcccaagtagctgggattacaggcatccgccaccacgtctggctaatttttttgtatttttagtagagactgggtttcaccatgttggacaggctggtctcgaactcctgacctcaagtgatctgccctccttggcctcccaaaatgctgagatgacaggcacgagtccccgcgccctcactgactgtttcttagggatgtccttttttctcccgtcttgtgcaggtccaaactgaagacggtacatgagcggatccccttggctggactgagcaagcttcccagtgtccctcagattgcaaaggtgagaaaccaacccgtgagagatggtggcttcctctctcagcccagggctggcctctggaatgggggtgcaggtatatcctgggtaggctcagcccttagagaaggggaggccactttactctttggccattgactgcactgataggggtctgggagggctgtgggcagatgcctctgtctttcctacgccctccatagctcatccttgttgccgaggctgcttaggaacagtatcctccatggtctctacttccaggtagttcacagctagtttgggaagtgagagaagtagaaagacggggctggatgtggtgagtgctgtaggacttccgtggaggggtgagggcgggtggcctggggaaccttcacagcagaggaaagggctgagttgggctgaaggatgatccagattgagcacccccttgagtaaggaggctgcgaacctgagaactgagttagcaaagtgggtgagcaagagagtcagctgggttggttggaccctcactctgggagcaggaatgtcacagaattgtgctggaaacctttggtggcagttgtgggctggatagtttttggccttgtcttcaggccagaacggtgacgagcctcaggctttgtctaatcccttcccacacttcatcagcaaaccccagaaagggcggttgacttgcctgggcacgtgttagtgagcagcagtcagaatccccgcccaggcctcctgacccatgtgcctcgccctcccatgccgcattgtccaggtgggcagaggagcccagatgtcctctacagatatcatccctgacctgcgtcttcttctcccttctcaggctttctgtgatgatgcagtgggactgagattcaatcctgtcctgtaccccaaggtaaggaccttcatgctcccaacataggggccctgcagcttggcaaggatttgcagacctgtggctctttggggagttctctgcatcatagtggggtttcgtggggtctccataataagcttccatgtctccctctctccctgcccaccccttcacaaactgctccactgggaacccaacctcagccatgcctaggtctccagcccagctgaattggtccccaggctgctgtgaaggtgacagagggtagcagtgttgtagcttctccaccacacctcattggtacctccctgaggccagtgctggaggtggacgtgactctgtagctgggggctggtgcagatccagtctgctgtcacagaggggcgggaagtacagcaggcagacaccaagaagagaaaggccagacagccgccccgccattgcctgtgttactgcagctctccggccatataagcctctgctgccttcatttataaaccagctggttttctgatatcagcttcctttgaattggcctgatactgaccccagttctgatatgggcgtgtgagtgggaagaagagcaataataataaacccactgaggaataattatggcacaagaggactgaagtcacccatggacagtgaattgcttgaaattggccacaggaaaagacccagtgcatcgactgcgtcttcatgggccagcaggctctggagagggacaacggaagcagagctgtgcttctgagcttctgccgtgggtcacgctgcagcggctgaggcctgctgggaccggctctgtctatcctctgagtcccaactctgacaaccaggacccgtgagatgaaatgtctggtgaggaagagaggccccattccagcagagacatccagaatcccctggaacaaacactctttttttgagactgagtctcgctctgtcacccaggctggagtgcagtggcgtgatcttggctcactgcaacctgcacctcctggttgaagcgattctcctgcctcagcctcccaagtagctgggactacaggtgtgcgccaccatgcccagctaatttttgtatttttagtagagacgggcgtttcaccatgttggccaggctggtctcgaactgacctcaggtgatctgccctccttggcctcccaaagtgctgggattacaggcgtgagccacctcgcccggctggaacaaacactttcagtgttcaggattgggcatgccactctcagaagcagccgtgtatccatctgcagtggctgagcgaatggcggagtcctttcctgcacagagcctttcgtcttccacgtgcctctgtttagctgttttagcatctgttgataccaggagtatgctacgcttcattgaacattttctctcattgagactgacctcccctttataattacaactgaatgagtggggtttaaccagacattaaaatcccatcataaaggtctaacttaactaccggtttggcaattttggttgtcaaatcttagccaccgagaggaccaatggtgtttatttgcagagttctctctatcccttggaaagcctcgggccttggtcataatggaagagcagctgtattttcatgttttctgtatctgaaggaccgctgagtccggctgggatgttcatctggctgagatgcacgcatgtgtgtgtttttaaaatttgcagagtttagaacgttctttggacgttctccatggcctggtgcctctccctggcagggcagctgttcctcccctgtgactcacccaggcaggagtggaggctccagggtcgggcagcagcgccgtcgctgggggagctgcgaagcgtccgtttccccagacagctgacagctgagagcctcacagagacacacagtgtgtggcaacctcacacaggccgcagattccggccaataagtcgttcctggtttgttcttcctctcgcataacgcgtggttgaatccctcctttttttttttcttttttaaatgtcacatttaatgttttcaccgctgtccttcaaatctaagttgtgcaaagtgaccagaaagtgtgccacggtaattgaccagcctctgagattgaacctttcacactggtgcctttttgggctctttggacgctaaacacgtttctcattcaagtgcgttgacatgcttcagttgggttgattctcaggagcgtcataaaaaacaaaacaaaacagaaacaaagatattgcgccatctttgtttagtaatttaatgtttgtgtctttcgtagcaaataattacttcattgaagttaaaacttccaaacataacttattaatggtcttcaaattcagctcagatcactcaagtcgaaagtactctgctaagtacagataatttaaaatagctttaacagttaattgtccataacacacaccaaggtttttttcctagaccaactgtaagacgatccattactattccttgtacaggtgaaaaatgatactcagttttcttgtctttttatttttaatgtaaaagttggaagggacgttcaaatttcaagtctccacactgagaatccctcctttttattgctgaggttatcccaacagctcccagatcttttcttcccccagtaagctggttcagctctgatatttctggagggtcatatagatgatgatggtgttgatgatgatgatagctgctctgtgctcagttctttctttttgaatcttcataaccacacatctgcgtttaacagatgaggaaactcagctccagagaagcagctcactcaaagctacataggtaaaaacagtggattcaaaactagagtttaggctgggcgtggtagctcatgcctgtaacctcagcgctttgggaggctgaggcaggcggatcacaaggtcaggagttcgagaccagcctggccaacatggtgaaaccccgtctctactaaaaatacaaaaattagccggtgtgatggtgggggcctgtaatcccaactactcgggaggctgaggcaggagacttgcttgaacccgggaggcggaggttgcagtgagccaagaccacgccattgcactccagcctgggtgacagagcgagactccatctcaaaaaacaaaaacaacaaaacccgaaaaaacttggagtttaatttttctgatcccagtcatcaactctatgatgcgtaacggaaaattagatagaaccaggagtcaggttttaaacatttcctctttgcatattgtattagggtatgttcctccttagcgtggtctccttagagacctctcattttatgcagaggggactgaagtttggtcaggagcggtgacttgctcggactcatgctgctgattagaggtggaattaggactagagttatccttgctgaccagttttggggttttggcttcactttttacaccacagattcaacactagggttaagtaagctgctggacacatgtgcccgagccttgactggcacatctggatgggagtggaatgagtgatacagaggtttggttcctactggggaagcccaagttttagaagctagctgactttggagctgcggcctgactgtctacttattatttctctctctctccctccgtgtatgtggatgtttcataccagggaacacattctctccccaaatggatgcttcccctgccatgtgcttcctcacttgcttccaaatttaacaaatgttgattttttttttcttgccacattttccaggcctcccaaatgattgtgtcctatgatgagcatgaagtcaacaacacattcaaattcggagtcatttatcaaaaagccaggcaggtaagcagcaccatccataccggtgactgtatcccgtggtttctcacttaggactctttttatccccacccagaacacaggagtcctgacctgcgttctgaagcatttggaatacaacggtcacatttaaggtatgaattagactggaggtggcagaactttccagcaagggtacttcttacaaaaaggcctgcacgtccttaaacagtgatgtttttttttttttaatatagcaaattctcattcttcctggctgcctcgtcttctacgtatttatgggctgctggttataagaaaaaccagactaggtcaagggaatggaggagcataggctgctctctccttgcccaaatttctccccactgggaattagctttttctccccaaacttgagtgatgtgatggagccagctgggtgcgtctcttcacaactctgttccgtgacatcatgttggcagcttgaagtcaaccatggtggaagtatttacactatggaaatttgcaaacaccagggtttctatcttcctcctttggagagccagtgactcaaaatatgccagcacaccactgctcagcctctgtgttttgtagccctcacacgttgctttggagttaactggccagaaccatgtttctcaaagtgtgtttcatgaatgcgagtctgatggtgtactctgtgagcaaatgacctggggaggggttgtcacttgtgtgggaaccttttaaaggcttaaagaacccccaaggtaaagggctctttataactttgttgaacttagtggtttccatacttacggacacaaacttcccatcttccctacctctttcctaccatgaacatttattaacatcccaagtagaggggttagctgaacacactgtttcctcaccgagactctttgagagaaaagttccacacccatttcatctttgtatcatctaagagcctagcatagaaatacaccttcatataaatacactccactgttaggtgagttaatgaacgaataaaaatgttggccctactaatggcaggttaatagtatcttctgatactatttgtatttttttgcatgatggtatctttcttggttagacgacacctgatgttctcatttagagatattggcccttaagagacatgcgtttgcttaaaaatattctaattatatgaagagtttaggatctgcaagacgaacactgatgaatcttataagttaagggagattattcaggtagctactataatcattttcacatattacatttttattttatacagctttgctaataaaaccccctaattaaagttctttgcttgtggaatttaccaaagcggatcttataagctgattataatccaatgttccagcaaagttataattactgaacatgagccatccgtctccgagagggagtctgtgtattgtttatgtacctgatgctgctgtggaggaaaaagccaagaagataatttttttttttttttttaagaacctaggcagattgttgttttgcaaacctgcagctgggggacatttaatatgaacatttgttgcatcaaagccctatgctggtctctgggtataaatgagcctcacctaactctcgtgtttgctgttcactgtgctgtgcatgctgggggatacggtgactaagacccctccctgagtgcacagtccagctcaaggccaggatcaaaataatggcaatactactactctcaggctggatgtgaatcttgcaagagaagtgcaggtcccacagcacacgctgcattgtttttctagtgggagatgtagtttgcctggaagcagctgctcttccacagtctggcctcatgacctggggcaagtaggacatgtggctagagttgtgacgccttcatggcatgctatagatcagggattggcaaacttttttgggtaaagggccagatagtaaatatttttagacttcatgggccttggagtctctgtgacagcctctcagctttgccttggtggtgcagaagtagcaatagacaatagataaatgagttggcctgtctgcgttccaataaaactttatcgataaacacaggcagcaggccagacttggcccatgggctgcagtttgttgactccttctagagtgcggtgtttcccagccttcagacattcacagaccatatccaggatctgtatcatagcatttgttgcaccctatgccactgttaagatctttatcacaatattttaacgaaatattttctttaaaaagttttgttttaaacttacatacatttattttttatttttatttttatttttttgagacggagttttgctcttgttgcccaagctggagtgcaaaggtgtgatctcggctcattgcaacctccgcctcccgggttcaagcaattctgcctcagctccctcgagcagctgggattacaggcaggcaccaccacgcccagctaattttgtatttttagtagagacggggtttcaccgtgttggtcaggctggtctcgaactcccgacctcaggtgatccgcctgccttggcctcccaaagtgctggtattacaggggtgagccactgcacccagcaacatgcatttatttttaaaggaaattttatatcactcctctaactggaaaaccagtatcatgaaatgaaggtaattctaaaaaaaaaatactgtaaaaagcaaaataaaattattgaaatctaccagattctgttgcctgttgaaggcatggagcccaagttctgctttttgttgttattgttacaattacctactgaagacattctcttgaagtgattgggtaggctagagtgtctttgtatcatctgccgctcttcatggcagcctgtgcatgtttgcagagccttcagctgtttgtacatcctgctactgtgggtagagcctgttgatcaggcagtgtttgaaggctgttactgtttgcagagcttgctactgttttcagctttgttttttacaaaattagccaggagtggtggtgggcgcctatagtcccagctacttgggagtctaaggcaggagaatcacttgaacctgggatgcagaggttgcagtgagccgagatcgtgccattgcactccagctggagcaacgagcgaaactccatctcaaaaaaaaaaaaaaattactaacctttttatctttaggtatttgtagattcacatagagttgtaaaaaataatacagcgagatctcatgtaccctttacctactttccccgcaaagtaatgtctgacaaaacgatagcacaataccacaaccaggatgtggacatcaatctcccagctccagtccgtaacccctgacaaccactcatctgttctccaacttctaaaacattgttatttcaaaaatggtatataaatgtagtcatatagtgtataaccacttgagattggcttttttccagtcagcaagattaatccaagttcttgggtgtatcaatactgtgttctttttcattgctgagtagtactctgtggtattataactgtaccacagtttgtgtttaaccatcacccactgaaagacatttttggctattatgaataaagttgctgtgaacatctgtatataggtttttgtgtgaacataagttttcatttctctgggatacatgcttaggaatacacctgctgagttgtatggtaattatgtgtttagttttgtaagaaactgccggccgggcgcagtggctcacgcctgtaatcccagcactttgggaggccgaggtgggcggatcacgaggtcaggagattgagaccatcctggctaacacggtgaaaccctgtctctcctaaaaatacaaaaaattagccaggtggtagtgggcgcctgtagtcccagctactcgggaggctgaggcaggagaatcgcttgaacctgggaggcagaggttgccgtgagccgagattgcaccactgcactctagcctgggtgacagagtgagactccatctcaaaaagactctgtctcaaaaaacaaaaacaaaacaaaaaaaaaactgccaaacagttttctagtgtttcttctcaccagcagtgtatgagtgatccagtttctctataacctgccagcatttggtgttgtgactgttttttattttagccattctgatagatgtgtagtggtatcaccttatggttttaatttgcatttctctaatggttaatgatgttggacatcttttcatgtgcttatttgccatctgtatatcctcttaggggaaatgcctgttcatgtcttttttttgagacagagtctcactctgtcacccaggctggagtgcagtggtgtgatctctactcactgcaacctctgcctcccgggttccagcgattctcccacctcagcctcccaggtagctgggactacaggcacgtgccactatgcccagctgatttttgcatttttagtagagactgggttttgccatgttggccaggctggtttcgaactctggacctcaagtgatccacccgcctcggcctcccatagtgctagaattgcaggcgtgaggcaccgcgcccggccgttttcatgtcttttgaccattttctaaatggatttttttttttaactgttgggttaaaaacatttttaaaaataacagctttattgagcacatcagcataattcttgtaccatataattcataatgttatgtaatttatatctcaatgaagtgtgcagttcagtggtttgtagtgtaaccacagaatcgtgcacctgtcctcactaactccagacattttcatcacccccaaaagaaaccccacactcaccagcaggcactccccatccccctttcctttagttcctgccaaccctaatctaatttctgtctctacagatttgcctattctagaccttttataaatggaatcatcatatgtggccttttgtgtctggtttctttcactcagcgtaatattttcagtgtttatccaggtcgtagtatgtatcagcacgttgttccttgttcatggccaaataatattccattgtgtggatagcccacattttgtctatctattcatcagatggacatttgggttctttctccttttgggccattatgaatagtgctgctattgatattcatgcatacattttctgtggacatgttttcatttctctttggtgtatacctgagagtgaagttgctagatcatatggtgactctatgattagcctttggtatatacctcagagtgaagtttctggatcatttggtgactctgtttagcctttggcacatgcccgggagcaaagttgccagatcatatggtgactctgcgtttagcctttggtatatgcctgggagtgaagttgccagatcatatggtgactctgcgtttagctttccatatatgcctgggagtgaagtttctggatcacatggtgactctgcgtttagcctttggtatatgcccgggagtgaagttgccggatcatatggtgactctgcgtttagctttcgggacctgcctgggagtgctgttgccagatcatatagtgactctgcatttagccttttgaggaactgctggactgttttccacagtggctgcgtcattttccattttcagcagcagcgtgtgatggttctgatttctccacaccctcaccaacacttgttattgccttttattgcctttatttttcattgtggccatcctagtgggtgggaagtggtatatcattgtggttttgattactttagagttttcagagttctttattctttttttttttttttttgagacggggtctcactctgtcacccagaccggactgcaatggtgtgatcttggctcactgcaacctccgcttcccaggctcaagcgattctcctctctcagtctcccgagcagctgggattacaggcacccaccaccatgcccagttactttttgtatttttagtagagacaaggtttcaccatgttggccaggctggtctcgaactcctgacctcaagtgatccacccgcctcagcctcccaaagtactgggagtgagtctccatcagtccctcctctctccaccccagtcccactgagggcagctatggtggatgtgctgggagacagggagaaaggaagaaagggaccaggtacctgggcatccatattccttcctttagcatcagaaagaatttttctaattcctgcccttattcctgtttctctttcagaccctggaggaggagctatttgggaacaatgaggagagcccagcttttaaggagttcttggacctgctgggggacacgatcacactgcaggatttcaaagggtgggttttagccaagtgacggctccagctccatcaacaagggcactagaggaagggcaagacagctcagtcctcagggagcacgtgtgagttaaaaacacacaagaaatgagggatggcttttcagggtcttgtcgctcactgcatttctaaggaatcaggggtccaaggagtgatccagtgtggcagattcccctgaaggcgttcacgttcggccctgggccccgccccagatgtgccttcctacttacctttggcccagactgagaatggaaggaatccaccttccctgtcactcacctgccaggtgtgtgggaaagggagccccgtgcagttttggggggaaatgacctattttattttattttttatttttttatttttggagacagagtcttgctctgttgcccaggctggagtgcagtggtgtgatctcagctcactgcaacctccacctcccaggttcaggcgattctcctgcctcggcctccggagtagctgggactacaggcgcccgccaacacgcccagctaaggtttttgtatttgagtagagacggggtttcgccatgttgcccaggctggtcttgaactcttgagctcaggcaatccacccacctcagcctcccaaagtgctaggattaccggcgtgagccgccgcgcctggcctgaaatgacctattttagataatacacaaagaatgcatcatgaggagctgatgcaaatataacagttcctcaggcaggagtccatacaacagtctatgcttttttttttttttttgagatggagtcatgcgctttgccaggctggaatgcagtggtgcgatcttgactcatggcagcctttgcctcctgggttcaagcgattctcctgcatcagcctcccgagtagctgggactacaaggcgcgcgccaccatgcctggctaatttttgtatttttggtagagacggggtttcaccatgctagccaggatggtctcgatctcctgacctcatgatccgcccgtctgggcctcccaaagtgctgggattacaggcgtgagccaccgtgcctggctcagtctatgcttttttaagtgggcagtaagatagaacattggggccgttgcttggaaaactctggcccttgactttccttggccaagaccgcatttgggatgagtccagacctggccagcctgttttgtccttggtggctggcagatggctccaggccccagaattctccatcccagcagccagattgacatgagctcctcacatcgtgtgaaaatacctagcccagtgcctggcacacagcggatattcactaattgctttcttcctctgcttccttctctgtccttccttctttttcctttcctctcttcctccatcttctccctccctcaaggtcatcacggctgtctggggtcagtcacacctgggataaaacccccgctccatcacttattagctctgtgactttggataagtgacttgacctctataagcctcagtttcctcactgtaaaaagcgagataaagggctgggctcagtggctcacgcctgtaatcccagcactttgggaggccgaggtgggtggatcacgaggtcaggagtttgagaccagcctggccaatatggtgaaaccccgtctctactaaaaatacaaaaaaaaaaaaaaaaaattaggcaggcatggtggcaggtgcctgtcgtcccagctacttgggaggctgaggcaggagaatcgcttgaacccaaaaggcagtggttgcaatgagctgagattgcgccagtgcacttcagcctggtcaatagagggagactctgtcaaaaaaaaaaaaaaaggaggtaaagatagtgtcagccctaaaaggttttggggggattaaaataagataatgggctgagcgtggtggctcacgcctataaccccagcactttgggaggctgaggcgggcagatcacgaggtcaggagattgagaccatcttggccaacatggtgaaaccacgtctctactaaaaatacgaaaaattagccgggcgtggtggcacgtgcctgtagtcccagctacttgggaggctgaggcaggagaatcgcttgaacccaggagatggaggctgcagtgagctgagattgtgccattgtactccagcctgggtaacagagtgagactctgtctaaaaaaaaaaaaataaataaataaataaaaaataaaagataagataatgctcacgaaacacttaagtgctgttcagggctagctagtcacgattgttattgttcttatattgccaccttccattgactttgagatgctatcattataagacacatcctgtgactttaaaatgtgaaaaaacggccaggcatggtgggtctcacctgtaagcccagcactttgggaggccgaggcgggtggatcgcttgagcccaggagtttgagaccagcctgggcaacatggtgagaccctgtcattaacaaaaatttgaaaaattataaaaattagctgactattgtggtgtgctcctgtggtccccgctacttggcaggctgaggcgaggaggatcgcttgagcccaggaggttgaggctgcagtcagccatgattacaccattgcgctccagcctggatgacagagtgaacccctgactgaaaccaaaactaaacgtgggccttagaatagctgaaatacagtatagtaagcccagaaggtcctcagagttatgaaattctatccctttattttatggaggcctagagagactaaatgaattgtccacgatcacgtgctgatttagtggcagaagcaggtctagaacccggagctcctgccccctgtccagcattctttctgccatgccagcctgggcacattttctggcttgtattgtagtgttggggatgctgagattctaggtccatcttatttcattttcttaaaggaacctgcatctgctgaagactgtgatcaaagctggcagccgtgtgtataaaggcagaagggacaactcctggaagcccacccagttccttagagcttttctttcttgcctgtgaggagacagccagagaagggacttccctggatactcccaagcgggatgctgcagtggttgggcctgtatcttagggactagctaggcagaagttgagcatctgccacctcttctgactgactccagatgctcctctggggctccccaccagccaccaggatggctggctgccctagctctgggcagaggacttggacatggccttgcagagagcaaagaaaggccggcgccccaccttgggggaatggcaccggggatgggcatttgtctgggattgtggatggatgcgcttccttcccatataaccagcaagtgtggacacggcacagccaaggcttgagatggaggttctgctttgtgattgattggttgattgattgattgatggagtcttgctcttgttgcccaggctggagtgcagtggcgccatctcggctcactgcaacctccacctcctgggttcaagcgattctcctgcttcagcctcctgagtagctgggattataggcatgcaccaccatatctggctaacttttgtatttttagtagagacgggggtttcaccatgttggccaggctggtctcgaactcctgacctcaggtgatctgcctgcctcggcctcccaaagtgctgggatgacaggcgtgagccactgcgcccggccagctttgtctaaataatgggtttgtgggtagagtgccagcgctgatatacctggaagaacagatctacctgcttttcccacatcacagcctgctctgccctcagctctcctgtctcctctgctgcgtatcctctgctgcgtatacttaggggagcttgcattaagttgcccactttgcctcactctcttttctccccatctcctgccctgttttgttgacagtttccgaggaggcctggacgtgacccacggacagacaggggtggaatcagtgtacacaacattccgggacagggagatcatgtttcacgtttccacaaagctgccatttaccgacggagacgcccagcaggtaacctggtttgggagggctttgggagcccagggcgggcgaggtgagggcctgcctctggtctgacctgctaagaggctgtggccgtccccatattcgttcccgtagccggccattcgttcagctgcgcagcagcgtcacagtccgttctgctgtgtttctggccgaggctgtgcctcagcggtccgttctgttgtgtttctggccgaggccacacctcaggggccctgggcgggaggcggggcagagcttgtgtttcttccacgttgactgatgggaaaactgcagcccatggtggtgacaagacttccttgaggtttctccgtttatcaggggcagagcccagggcagagcctgggggccctggtcatagagggtggtggcaaagggtgcatggtggggtttgcagatgggggcctgaagccgcctgtgccactttggagcgtgtgactctgggcaagccagttaaccttctcatctataaaatggggggtaacaccacccatggtagagggtgattgtggggattacatacatttctgactagggttcatacgatgcccaattcatggctggcttcctatagaacagctgttcactgtccagcccctggtcattttgtcccccttcctgccccagtgacggaaggctggttattgcgtgagaatccttccccacccccagccttcctcatctcacaggctcctctctcaccacacctgtgggaattcagccttgacctccactagggagacctggacgagacccctgtccccactgctttcctgccgtgccccccgtttgctgctctgacagccgtgcatccctggggagagccgcggctggttcctggctgttacaagcccagttcccccagcctgccttctgccccttttcagtctgggaaaataagaaaatgcaggcaggcctttgcccaaactctgacctgtgtgtctctgagcaggaactggggagggagcacagatgtaaaattgtaaacatagtgcctggcttcttaggaaagaaggaaattggcaaacgagatgatgagttggctctaaaatagctactgaatgttccagaaacaaatggaagcagaaatccttttgtatccaaagtgggttttcattcaacctttcacctccagcccctctgttcccttatggcctctctcacctgctgccccggcctgggcctgaggcctgttctctctgggccttctcagtcttatgtgtgtttcttgggaaatacaccttggcacagggctcggctcttggcggggactgagtaaatattaagtttctcttcctgagaaatggaaagatgcgcgtggagtaagtgaggcaatttgtgtgaaagtgcccagcacagtgcttggtgtaaaacaggtgctcagtgaatgagaaactcagtgtgaagggactgagcattgggcctgcatgcagtgggtgcttaacaaaggaacaaatgcatagacaggcacctagccaggactcgacatacaggagcgggtttttgtgtgtgtgtgaggagggctgtcactctctcacccaggctggagtgcagtggtgcgatcatagctcaccgcggccttgaacttcaggacagggttaacatttgatatcatgcatgaacagcccaacatggttccagggacacaccaggtgcttggtggccgagatcacacccagaagcacctggccctgcttgggatatggagttatggttgggatcctccttccatcccacctacgccaagctgggtgagcagtgctgtcatgatctgccacctcatcactctcattcacaccttcaagaccccctgacacgtctcctcctccaggaagccctctcaggttgctttccagccctgtaattttgcccttgcctctgtctccagagctgtcagggatttcatgcacagcagctgacttagcccttgctggctggtggctttgttagttttctcaggtggcttcacctgtgtttgtatttctcccagatcaatgacaggctctaccagggcaagaccccgccttgccttttaaatattcttgccaagtcctgagtcagggatctgcatgctgtagaggtcagtaagatgctcgctagcctctacctaacgacttggccatcttccccattttttttttcctttttggtggcttctaaagattgaaagaaggttgggcacagtggcttatgcctatcatcccagcactttgggaggctgaggcgggctggtcaggagtttaagaccagcctggccaacatggtgaaacctcgtctctaccaaaaaatacagaaattagtgggtgtagtgtcacgcgtctgtaatcccagctactcgggaggctaaggtgggagaatcacttgaacccaggaggcggaggttgcagtgagccgagatcgtgccacggcactccagcctgggcaacacagtgagaccctgtctcaaaaaaaaaaaaaaaagaaaaaaaaaagattgaaagaagaacccccctggttttccccaaataggaaagcaactcaaaagatacacaaagcacgaagcgtgttccatgcacttctccccttgctgcctggcattggtactgtgctttcatacttaaacttccaaaacaacaaccacgaactcttctcactcagaattcagttttcctgtgtgcaaaggaaagtgaacccactctttccccaaaacatctttcatgattttcctaactggcttataacctctcaacactttttatttagctccagagaaagagacacattggaaatgacatcgtggccatcatcttccaagaggaaaacacgccgtttgtcccagacatgatagcctccaatttcttacatgcctacatcgtcgtgcaggtcgagaccccaggcacagagaccccatcctacaaggtaaggagaacgccttgttggagggagtggtgggcctcgacacctcaccctgtgtggatgctgtgatatcagaggacactagtcctcagcagtcagagattctccatgagtttgcaggtttctggggtttggagctagattctgggtagggaggaccttccaaggccacctgatcccccttgctgcctccgggctcaatggcatctcacttgaggattgaggaggtgtgagtgtagtatttggaatttggtgatgccatttgctcgctgtgagtgtagtatttggaatttggtgatgccatttgctcgctgtgagtgtagtatttggaatttggtaatgccatttgctcgctgtgagtgtagtatttggaatttggtgatgccatttgctcgctgtgagtgtagtatttggaatttggtgatgccatttgctcgctgtgagtgtagtatttggaatttggtgatgccatttgctcgagtaaggcagagctggaataaagaaagagcgtggaaaggacgagcaggaaagggtagcgatagaagggtgctaacgaaggaaaaaaagaaaaaaatgttgatggtgagggtggagaggaggggcctggtagaccctggccactgggtaaggccctggcctggctgttttggacaaatgatggatcttaatttaaagacctccagggaggcagatacgcaagcacctgggtctgaacctcccaagcagtcacgggtctgtcagatggctcgaaatcctcaccggtgcagatgacagcgagacagggcagctcattgcccctgcagtcccccgctccccactcctcatggctggatctctgaccctccctcctctgctccacgagaaagaatctccacctcttgggcaacagtctcttggtatcacagtgctgtggcgggcatgggactcaagggcgttggactgaggcaggctttcaaggcaagggttaggcagtctctgactccctgcagataaatgcaaaatgctgaatttgtgcctttccttggattcctgaaaagagaggccataccttaaattctcaaagcgctccctgctccgcaaaatatcaggaaccactgttctaagggggaggaaagatgagcctgtgattgccaatgggtaaccatgaggcctgaaaatgtttcccgtcaaataatttcagcccatcctgattcctggggttcatgaggccacagcagttcaactcagttaagtgcaaaattcacgtcagcttttaaaatgtgatgtgaatcgtcagaagaaaataaaaagaggctgggcacggtggcgtacgcctgtaattctagcgctttgggaggcagaggcaggaggattgtttgaggccagaagttcaagaccagcctgggcaacatagcgagaccctgtctctaaaaaaaaaaaaaaacagaacaaaacaaaataaaacaaaacaagcaacagaaacccaatagcaaccccctcctgttgaggctgattccttcatgcccaggctcatgtgtccctgccattgagcagttttagctgaagctggcgaagacatggtgtgagcatttattttcttttcttttctttttgagacagagtcttgctctgttgcccaggctggagtgcagtggtgcagtctcggctcactgcaacctctgcctcccaggttcaagtgactctcctgcctcagcctcccaagtagctgggattgcaggctcctgccaccatgcccagctaattttttgtatttttagtagagacggggtttctccatgttggccaggctggtctcgaactcctgaccccaagtgatctgcctgcctctgcctcccaaagtcctgggattataggcgtgagccactgtgcccagcccatttcttgaaggctataggatcacctgctttgagtgaaatgggcattcacttcaaacagctgctcgattcaagtgttggttgaagcaagttgacttactcagtgcctactgtgcgccaagctccaggctggaatggggctcgtggaggtaacagaatcagcctcagggccttcctgatgccggagaaggggcagaagaagcagggagtgcaggtccaagcaccaggctgaagtggggctcgtggaggtaacagaatcagcctcagggccttcctgatgccggagaaggggcagaagaagcagggagtgcaggtccaagcaccaggctgaagtggggctcgtggaggtaacagaatcagcctcagggccttcctgatgccggagaagggacagaagaagcagggagtgcaggtccaagcaccaggctgaagtgaggctggtggaggtaacagtatcagcctcagggccttcctgatgccggagaagggacagaagaagcagggagtgcaggtccaagcaccaggctgaagtggggctcgtggaggtaacagaatcagcctcagggccttcctgatgccggagaaggggcagaagaagcagggagtgcaggtccaagcaccaggctgaagtggggctcgtggaggtaacagaatcagcctcagggccttcctgatgccggagaagggacagaagaagcagggagtgcaggtccaagcaccaggctgaagtgaggctcgtggaggtaacagtatcagcctcagggccttcctgatgccggagaagggacagaagaagcagggagtgcaggtccaagctccaggctgaagtgaggctggtggaggtaacagtatcagcctcagggccttcctgatgccggagaaggggcagaagaagcagggagtgcaggtccaagcaccaggctgaagtgaggctggtggaggtaacagtatcagcctcagggccttcctgatgccggagaagggacagaagaagcagggagtgcaggtccaagctccaggctgaagtgaggctggtggaggtaacagtatcagcctcagggccttcctgatgccggagaagggacagaagaagcagggagtgcaggtccaagcaccaggctgaagtgaggctcgtggaggtaacagaatcagcctcagggccttcctgatgccggagaagggacagaagaagcagggagtgcaggtccaagcaccaggctgaagtgaggctcgtggaggtaacaagatcagcctcagggccttcctgatgccggagaagggacagaagaagcagggagtgcaggtccaagcaccaggctgaagtgaggctcgtggaggtaacaagatcagcctcagggccttcctgatgccggagaagggatagaagaagcagggagtacaggtcagccactgggcagctgaactactcaactgcttcttttaatagacagttgaagaggaagaactactgggaaggatccttggaatgaagccatgtgataggagggctcccagaccctctggcagaacgaggcctcctgtagacgtttagcatttgcttctctttcccaataggaaatgcatctcagctaaccagcttctccactttcccgagaccttagccgagtggtgcactcatacagagaaaaatcagagatccaaaaaagcgccaccccacctccagctgtggtgctagaagtctttacccactcttcttctccttttttttttttttttgagacagtctcgctgtcacccaggctagagtgcagtggtgtgatcttggctcactgcaacctctgcctcccgggttcaagcaattctcctgcctcagcctcctgagtaggtgggattacaggcacccaccaccatgcccggctaatttttgtatttttggtagagacggggtttcaccatgttggccagaccggccttgaactcctgactttgtgatccactggcctcggcctcccaaagtgctggcattacaggcgtgaaccatcatgcctggctgtctttactctttcttctaagccacaaagcacagcattgtcctcagaggggtgatgagaagcaggggggcagggcttcccggaggagcaggctgtggtaccttgatcgtgcactccacctgccaggcagacactgaggctggaaggccagacgtgtgaatgaggccagggagggggaccagccttccaaggcactccccaaagcgctgtccatccacactcccggcagcaccccaggtaattagcagactgcgaggaggacccggttagatcccccagggggcctgggtgaagcaggaccttagctggcccctgcaggctcaggggctgtggcaaagaaggctgagatttcctctgggactgagtaagccccaggaggcctccactggggagggtgagctgaagaaagaagagtataaaggagggacagggttgggtgtgtgcaggaaggggtcctcttctgtccacggaggggccgggctgcctggggttctggtcctggcactgcctctgctgcgtgaccttgttccttccctctctgggcctctagttttgtctgtgtgaaatgaggaagttggattagacacctgcaggctgctagccctgacatcctgcgggagggaaggaggcgtgcttgggtgtgtgtgtgtgtggtgggttgcaaggtgctttggggaaactctatttcaggagccctttactgggtgcaggtcagcaggggaagtgaaaaggccactgggcgacagtggttaccccttaccagctgcttgctcatgccaggcacggtgctgggtccttagacgcacagtcttgaatcctgacaagcccctggtgagacaagacctctcgctagagggaggaaatggaagctgagagctgaacccacttaaggcctgaggccacagagccagggagctgtggctgaggtcctgtctgggtctgcttgcggtcttggtcattgagccatcagagcaggcgagaaattggctccacggagtcgggtgtgcacgaagcatcactctggattatttttcagaaatgagtgtagtcctcatcctgcctgcttggaaggaaagtccagctcagccatcaccaggactacccctttccctcccccctatccctgcctccctctccggaagtcctcaaaggtgtcaggaatctcaggtgaagcccaccgccggggagggccctgtctttgtagccccctccccgtttcccgtcacgacttgtctgttgctcggacgatgctctgtgtgccaccgcggctcccaggccactcttgggcgtggggcctttgtcacgtttgaagctttctgaggttcccagtgcatcctcatgacccacaccaagctccttcctccttccagccatgcaggtcccttccccagagtcacctgcatctgcctctctccctccctccaagccctcgctggaggccctcgctgcatttagaaaacaggaaggtggggctgtgttcaggcaacttctgctttcagtccagtgacccagatgtccccaagaggggggaacaacaaaggcctggccgcctggttggaatggggtcaagagaggcgcacaatgaggatggaaggtgaacgcacgtcgcaaggaagggccctgtcctccgtgtggcccacagggctctgctgtgggactgtccagctggagggttggatggacttgaggatgtgtctgaagccacttacacggtcggcacagaccactctaatgcaggctggaggaggagggggagtggggtgggaagggcagagctggggctgccctctggcctctgtcccaggtgcccacggtctgcagtctccccatagccttcccacacccccacccctgattctggctctgtgactgaattcttgacctgggccaccggtgcctggtgggtggtggtagggaaccgggttcagctgctggagcccagccagaaatcacgtcagccgaacgcgcaccatttcctgactcggggcactgcagtttgggctgggcagacagcctggagcttgagaagagaaagcccgtattgaccagctctctcccgctccgtttcccctccggactctggcagggcctttccttggctcggtgcccagctgcctgctcacccggcctggcagactctgcatctgctccacttcacaggccggggaggctggcagcacgccagggctgggctcacgtcagcggctgtgtagggaagggagggcagtctcccgagagcctcacagcctcgtgggctgagaataggtgaagtcagggcacctctgtgcagagggaaggcggggtgtggggcccgtcccacgcctgggcgacccccatgcagcgaacctcgaggccgtcactctaaagctcagtctcactcagggtgccagaggtgcgcgccccaccctcagttcctagcctgggcctaggactggctgaccccgtgtgtggggccagggctcccgaacacgggtccaccggctgcacgagagtttccggggggccctacccttccgattcggcaggtttaggccagagcccatgaacccagtctgtatttttaaacacctgaagcaattttgaagcaattctgatttatggccgagctgaggagtcaggcttgggaagagaaccccagagacgggtcgggagaggtctggatgctctgttcctctgcggctaatcacctgtgggacttgggggcttctctgtgtgtctctgggcatctgtttcctcatcagggagaacagttctccctgtgccttctcagtaggattagcgtcacggtcgaatgaggtcacgagatgccatctcccgggcacttgtatggcattaaaattagggtcccagccctgtccagtcatcttgccaaacctgcttctggcctccaggaatgcagatgagaggctgcggatggccccacaccgtccggccccacttctaggaacagggtcagggcctgtgctggcgatgctcacaggagtattttgtttgtgttctgggaagaggaggagggagaaggtgagtagctttgtaaggagcgtggctcccgtaggggcagcgctcgtctcttccctccaggtccgtaccatgactctgtttcactcaggtctctgtcactgcgcgggaagatgtgcccacctttggtccacctctgcccagtccccccgttttccagaaggtaggacactcttccttctgcccctctcgcatccacgatgccaggtctcagtgcttgagtagcaatggttgggatggagccaaattcaggctgggaacattagggagctccttttgcaggttttggggggaacctcctttcttggggtctctccccacctctttcatgctgccagtctggcccagcataggaccacttgtcagggtgtttgacactggggttgcttttctgctgaaagacgggcttttatgttgagccccggtcaaggagccttgggcaggaatgagctccagtcgtggaagtgccactgtggcttcccaggaccagggaagcgggtttccttgttgggatatttgcaagtgggcttggcctgggctagaaatgatccgctgtcggaagggacttttcaggggttctccccatggccccggctctgcctgcctgtcactgtggctgaagaccttctggcaacagccgagagtgacagacctgaggtccgtcttgtctcttccagggcccggaattcagggagtttctgctcaccaagctcaccaatgccgagaacgcctgctgcaagtcggacaagtttgcaaagctggaggtgagagtgtggtttctgaaggtctccctcctgactgctgggccacctgttagccagcctcatccagggctcctccatcttttttttttttttttttttttttgagacagagtcttgctctgttacccaggctggagtgcagtggcatgatcttgggactcaccacaacctctgcctcccgggctcaagtgattctcctgcctcagcctccctagtaactgggattacaggtgtgcgccaccacgcccagctaatttttgtatttttagtagagacagggtttcctccatgttggccaggctgatcttgaactcctgacctcaggtgatccgcctggcccagcctcccaaagtgccgggattacaggcgtgagccactgcgcctggccaatcagtccttttttttttttcaagacagaatctcactctgtcacccaggctggagtgcagtggcccgatcttggctcactgcaagctctgcctcccgggttcacaccatactcctgcctcagcctcccgagtagctgggactacaggcgcccgccaccacgcccagctaattttttgtatttttagtagagatggggttttgccatgttagccaggatggtcttgatctcctgacctcgtgatccgcctgcctcggcctcccaaaatgctgagattacaggcgtgagccactgcgcctggcccaatcagtcatttttaaagcacctactatgtgtcaggccctattctgttccctgggatatggggataagtgagacagtttctatccctggagagtacacagggtagtcggggggtggggcagggggtcattactaaatagatagttatagtacagtgtgccagcactaggctgggatggaggtcagcacagctcagatagtgactgtttctgcctgtaggggacagagggtgtgttcagggaaggcttcctggaggaggtggctcatgcacagctgaatcttgatatcagatgaaccttctgccaggaggaaagagtggggaagggagggctgatctggcatggtagacagcatgagcaaaggtcaggaagaaccagagcctgacgtcaggagggagctcctgagggtttgctgtggctgaaggacccacgggggctggaatggtggagactcagccggagatgttggttggatcagatccagaagggctttgagctcgggacggtgggctgctggtaaagcgcttaggcaggagagtgaggggctcgatgtgtatgccagagggattgctctgacagtggtgtcattgagaacgatggtgacaaggacaggttgcagggcaagaggtgcaggaaggcggccagttagaagctatttacaggaatgcaggagagatgacaaaggcttatactgtatggaaggaaatggtttagggtcaaggttgggaagacttggtggactcctggctgtaagtgttgtgggacgtgggattgattgtagggtgactcttgggcctttggcctgggctctttgatgacatggtggccaagttgtgcctgcgaaggccgggttgctgaaagggccagtcctcatctgtgtgaatagcggcccctggcatccatgtgcatggctctggacgaacatctggatggagaggagcagtggggagttgggtgcgtggatgtggagctggggcagagggccgggctgggattcactcttccttctgctcctctaccaccagggtggagctgtggcagtggtgggacgacccagggagaagggcagggggagtagagcaggaggccgagcacgcagccttcatcttagctgcagcatttgtgagcacgaagctcagctcagcagtaggtccacaccgttgctgggccgggctgggcagaatgtcagcctccaggccaggtgtctggagctcacaaggagcaggcacatctctgctctcagagccagcttctccatccccaccctcttcccttctaggaccggaccagggctgccctcctggacaaccttcacgatgagctccacgcccacacacaggccatgctgggactgggcccagaggaggacaagtttgagaatggaggccacggggggttcctggagtcttttaaggtatgagcgtcagagtgactgatggttgctgtggggttgggattggggaagaaaggaagtggtccaaggtccatgggatactgatcccagagcccaagggccagctggaggggtgacaggaaacgtatgggtatcctaggtgtttgcaaagggcagggccgttaggaagtgtgtgaggctggagcagccagcagttttctcagcagcctccccatccttcctctatctgggtcatctcctccgggcccagaagtctgttaagcagggacaggtaaagaggtagcagtaggagaggagctggagcaagccaggaacatcggcgctttcacctgcctcctcctgggttggggagcccagggcagaatggcaggagcgaggaccacagcccttacgggtcttcgtagctgctgtgggtgccacagtgattcttcctagccagccggccgagcattggaagacctggctgggcaggggccatggaactataggcaagtccctttggactttgccaagggaaaaaaactaactagaaggagctgctaaaggaagcagtgagctccctgtccctggaagtattcaagtggagctcggacggcccccgagctggcgtgtggtagaggtttttcatcttatgcttgctgagtgcttgttggtccacgcagcacgtagacccagcatctggctcgagcctggctgtcagcctgtgcaggtggcggaacgggtcttgttatattcacgaacacacgtggggacaggatgagagacgccacaggcctgctcaggtccttacaccgaggcagagttagagcctcatttcaaacgcaggtcttctgattcttaggtccgtgtgctgctggattgcctgttagaaggtgatttggaaactcccatctgggggcattatgtgtgggactttatggggaattatgtgtagggctacacccacctctattaaaaccgcagctctgtgggatcctgggcagtctttcaagcctcttaaggtgcagctttcttgtcaacaacataaggataggaagcaggacccctgtcagagccattgtgcgagttcattgataccatgcctggaaaagtccagattgcctggaatatagtaaatgctcaaaaatgtcagctgttattacagttgtataaagtgaaagcttcacacacattatcccacctggagattcacaactgccctcagtgccctgtgaggaaggctattatttggggtgtaataattttggtataatagttcatactcagttttaataatgataggcatagtattatatgggaggaaaccaagcctcaaagagacagaatcatttgtgggagcaggtggagttgaatccaggtccgccggattccaaatccgacaccacctcccacttcctgactttgttaagattccacccgcactagcctgggcccgggcaggcctggggtcagtcccccactgcccggctggaccgcagagagcagggcacagctcttcctaccctagttggggccagctgccaagatgcctcttggggttgggaaaaggagctgagctgcttgtccaggctggtgggtgattcctggggcacctgtttcagtgctgatggacagtgggagcccgggtgaaataggagaaattgggagatcaagacggaagagggatgcagaagaagaggaacgggaggagagagggcgccaggtcagacaacccagcgagagaatggagagtgtgagatgcggtaaacaggaaaacgggcttgggtctggggaaggcaggaaggggggcaccacattaagccttccacaggctctagacttccttccagaggctccaccacactccatagcccacgtatcaaaacattctgcatccctcagtaaatgtaatttatgcagaactataagaggtgaggccaggtgccgtgcctcacgcctgtaatcccagcactttgggaggccgaggcaggcggatcacgaggtcaggagatcgagaccatcctggccaacatggtgaaacctcgtctccactaaaaatacaaaaattagccgggcgtggtgacgtgagcctgtaatcccagctactcaggaggctgaggcaggagaatcacgtgaacccgggaggcggaggttgcagtgagccgagatcacgccactgcactccagcctggagacagggcgagactgtctcaaaaaaaaaaaaaaaaaaaaaaaagaaaagttgagctgcagttggggagccaacataatgttgtattttgtagacatttaatgaagcacttgttttgagttttgcaggtttcttgtagtattttggagttaattggtttttcaggtttcaagtatttctatatcctggagatgcttgtaggctgtggacactctgcccatggtgcccaatggaggaggtggtccagcagctaaatacaggtggcaggtataaagagagtggcctgaggccgctctgtccagtcccccgcctctggcaggagtcgcagttgatctgtgcttgactcgagggggtctgacgtattcctagaggggcttacaagagaggaaacactttaagactttatcacgactcatctttgatccagtgatccagggaattcttttcaatactaaaaccctgcaactgtaggttgaagacaggcctgcttccagattctgctctcacacctacctgaggtagcaccgtggggcgtgggagagactgtgacagtcacacagagtaagcttcagggccctgacggttgtgaccagattttttttaaatttttttattttttaattttttttgaggcagggtcttgctttgtcacccaggctggagtgcagtggtgcaatcttggctcactgcaacctctgcctcccgggttcaagtgattatcctacctcagcctcctgagtagctagaattataggtgcccgccaccacgcccggctaactttttgtatttttagtagagacgaggtttcaccatgttggccaggctggtctcgaactcctgacctcaggtgatccgcccacctcagcctcacaaagtgctgggattacaggtgtgagccaccgcgcccggccatttgtgaccagcttttttccctcccacctggggagcacgagctcctgttccctgtccctttcgtcattgccctcacatctcccaagcatggaggcctgagctggggacaggccaggctcagccgaatggagccctggggcctggggtggattctggtgtttaggccatgcctgtggccaggcctgtgtgtctggcccagctcaggaaaccatccctagttttggtatttttttttcctgggcaccttgggcggtgctgctgtgtcaacaggacgttgcttagggagttcacccacaccttcctgggatcgctcttgaaacaagtgatacctgaaatgttccaggaagaaaagttacaggcctttatctcttcctgtcaaagtttttttttttttttttttttgagatggagttttgctcttgttgcccaggctcaggctggagtgcagtggtgcgacctcggctcactgcaacctctgcctcccgggctcaagcgattctcctgcctcagcctcccgagtagctgggattacaggtgcccgccaccacacatggctaaattttttgtatttttagtagggacaccatcttggtcaggctgatcttgaactcctgacatcaggtgatccgcccatcttggcctcccaaagtgctgggattacaggcgtgaggcactgcgcccggcctccttcctgtcaaagttctcatttcccaggctgatgggagcataactgagaatccccagggctgaaagccatctcagccatccatccttgcccctggtgaggctgctgctcccccacgtcagcactgacccttgatctttctcctgagcagcaggcctgccattgccctgtgttgtgccgcctggcacctcaccccgcttggagcagttccttacagctcacttctgtcctcccagctgtaatggaagcgtttctcccatgagacacagaacagttggcttttggacatctagacctacttttcaagctgaactgcttggagatagtctcaggaatctgctggttctacaaacacttctaaagtttgcattttcacttagatctaaaaaaaaaaaccttccaattataaagactgaacgtttggctgggcgcggtggctcacgtctgtaatcccagcactttgggaggccgaggcaggtggatcacctgaggtcaggagttcgagaccagcctggccaacgtggtgaaaccctgtctctactaaaaatacaaaaatcagatgggcgtggtggtgcacacctgtaatcccagctacttgggaggctggggcaggagaattgctcaaacctgggaggtggaggttgcagtgagctgagattgcgccactgcacagcagatccagactgtgtctcaaaaaaaaaaaaaaaaaaaaaaaaaacaaacctaaagtttgcagtgatcactccaaattaagagatgttcctatagggtaaataggtaaggcctgaagtcagcactgcatacgcagcccatggggccactggggttgggggtctgtgagcagattctcgggagtcttgcgagaacagctttcacgatgaaagagctgtacgttatgtttgaacgatgctgatctctagaccattttccagtgccattctcagttactgccagctgttgatgaggttgttattggtccgtaatgcaatgaaaagtgatgatacttgctgtaccgacgtcagatggacgtagagcacgtgcaggccacattttgagaaatgctgagctcacccagccctccactgacctcatcgcacagaggtggagcagaggaccggggaggagaaggctgccgggctggctgtgatggacccgggaccgtggcaagctgggagttgccaggttcatttctcccagcctttgagggactgtgatagttcatgccttggtctgacctgacccctagtggcaggaggggccacagctatccctggcagtctttgtggccccgcagtacctgcagggaggtacctgtaagccggtccccctagcagtgccagtgatggcaggtggagcacagcagggccccgccaagaatccttggtctttggcgtctttgccccctccttttcctcctgatggggagttgtgatgtcaggatggccccgctgttttgggggtccacgagagagctcaggccttgtgcttggccctgctccactcctgggtcggagtcatggtctcttggagcagagttggcatctgtcttgcatttgccccgctagagggacagaagacccggtgctgactcctcacacttacccagcctgccgcctcctcacacttaccttgctgactccggcggctgcaccaggactaattgaggagccagtgtcctccctgacaccagcctctgagtttttcttttcttttcttttctttttttttttttttttttttggtgggagccttgaaaattcgtggtttctaatcatccttcagtcatccaccagttgaattgtattttcaacctggaccagtttttaatatacagggacccttttatctggagcccagggttctgggtttggatcctggctctatctcttacctgctatgtgggcttgggcaataatttacccttcagaactttttctgtccaatgcctgtcctctctgcatctcagaattgtagagattcaatagatcttgtatgtgaagctcatgagaccagatactgttacacaggagttactatttcccacatggaatcctttctgggaaagagacagggaggaatacaatcacgtgtcactcaacgacgggaaatacgtcctgagaaatgacgggaatacgtcctacgacacacgtcggctatagagcccgtggctgccagcacagacctggatggtctagcctaggacacacgtcggctatagagcgtgtggctgccagcacagacctggatggtctagcctaggacacacgttggctatagggcgcgtggctgccagcacagacctggatggtcgagcctaggacacacgtcggctatagagcctgtggctgccaggttacaaagctgtgcagcaggttcctttactgaatattgtaggtaattgtaacacaaagacaggcatttgtatactaaacatctaaatatggaaaaggtacagtaaaaatatagtattagaatcttaataggaccagtgtcatctatgcagtctgttgactgcagtgtcattgtgtggtgctggactggattgcagaatataaatgattagtttggaatgtcatgattgatgatggtgttgtcaacgcacaagggcaccaagagaatgtaaagatgctgattttttttttttttttttttttttgagacagtctcgttctgtcacccaggctggagtgcagtggtgcgatctcggctcactgcaaccccagcctcctggattcaagcaattcttctgcctcagcctgccgagtagctgggattataggcacacaccaccatgcctggctaatttttgtattttttacaaaaattagagatggggtttcaccatgttggccaggttggtctcgaactcctgacctcaggtgatccacgtgcctccacttcccaaagtgttgggattacaggcgtgagccatcgcccctggccgagatgctgagatttatggagcacttaactcattcatggaacctggctgcggccaggcttggtggctcactttgggaggccaaagcaggaggcttactggagcccaggagtttgagaccagcctgggcaacacaggaagaacctgtctctatttatttatttattttaaaaaaggaagctcgccgctcctccagggacacctcagtgtgccaccacccctgtcctgccctcagttgttcaaagggtacatggctttatgatgcttgcgtgacggggtaaatagaacgcgctgactgttttaaccatgcggtaggaaaactgttgctaggtgaccctgttctatggtatagagagggagtgagagatgtccctccaggggcatctttgactcagataagagatgcccgatcaaatcaggggtatgaagctggtgggctacacacctcactgtcagtagctcatctagggggctgtccggtttacaaatggccctcctgagtctgcatcccttgtcaggatagaaaagcaggcaggatggggttctttgcccttcccaagcttggagaaatcctgacgtccagagagcccagggagacctgttgtttgggtcaggagcagcagccctgccattttcttgggaccactttgctgtagacccagctcttcctaagatgactcaaggctgggcgtggtggctcacgcttgtaatcccagcactttgggaggctgaggcaggtggatcacgaggtcaggagttcaagaccagcctggccaacacagtgaaccgccatctctactaaaaatacaaaaattagccaggcatggttgcgggcgcctgtagtcccagctactcgggaggctgaggcaggagaatctcttgaacctgggaagcggaggatgctgtgagctgagatcgtgccacacgctgtactccagcctgggtgacagagctagactctgtctcagaaaaaaaaaaagatggctcaaaagaggaagggaggttgtccacatgagaccatctgtaggttacacatggggtgtgtgagccaacacagttgtacaggtgtgcacaggtgtgaatccagaggggaaggggagcggggcccacaccttagtccttctgcatcagctttctgaagctggagttctgagagcagcctccctcgactagctcacactacgataaggaaaattcatgagctggtgtccaaggagggctgggtgactcgtggctcagtcagcatcaagattcctttcgtctttcccctctgccctccctggcttgtcagctttgtccctcaggcttggcccctcgtggccctaagatcattgtcatggttttgtctgctgacaaaacactgctgacatgttaaatcttttttgggaatcattgagaaaacctttccccagcgcacccagtggatatgccctcctctgccactggcaagaggataggctaactgactgccttaggcagatcatgacttaatcctgcgtcccatggaggaggaggacacgtttggctagaacctggctctgccagtggggagctcagggagcagaggtgttgatacttgtatgtgaacaacagataatattcgtgtccaggagtctttgcccttgcagaagcctggacaactgattaatccagaaggagcaccccacaggctctgggtctttcagcatcgcccaatgtgaggaatatgtcttgggcattcctcagaggcagaggccatgtcctacacatctcgactttcctgctgcgggtctcccagttcctggcacagtgctaggcacgtgagcagcctgcagcaggtgcttgttattaaccgtaagagtagccacacttatcagatcattacgatgtgctgggctgtctcctcagagccctgtgtgtattctcacaactactctgtggtgtagacaccaacatctctttcactctaagtctcagagaagctgggtcacctgcccggggttactcagctaatgcgtgctggagtagagggcccagaagcccagatacaaatcctggcagtgaaaccctaaagcctccatgcttttgactgctgagttgcattcctgcccggccagatccagtgactgatggaatgatcaaagggttactggagagaaccttctcttcctagaattctcacaccatctttgaaggcctttggagccagagagagcatcatccagggggcagccagagtcccctgggacttcttttgtcaggaaatccccccctgaggtggagccgagctctgcttcaacacagcactctgaggggtggttgtgccttcccgggtccatccctcccgtggctgagtaatcttggtttttagctgttctcactctcacatgtactttgacaaagccttgacctccctggtggtcctctcctgggtacttcaccatttgccagtgtgccccttgctcctgggtggcctgagcagctccgtgccccccgagaccctgcacttctgccaggctgagggtgcatctctttcagcacctccatcagaccaggggccgtaacaaaggcggatctgaagcccctgcaagtgggaggggcggctcagtgcatggattgatgcacagatgagtaagagaccctcacacacttgcacccatggccagcatattccaagttgcccagagcacactttgggatacaatccagtgtttattacagatggaggctcagttttctggaaaagagtcaacttgtggtcagacacctgagtgtgttgaatccccaccacgatgctgggtgtgaaacatagaattcccattttacagatgaggaagctgtagcttagagaggttagtaactaggtcagtgtcgcacaggcttggcgagctccaagcctcattttccttacctgtaagatgaagataataacctttgtccaccgtgcaggggagctggggcgctgacccctcagattccctccagccggggctgtgccttgcctccacccatgcccagagtgtggggcagaatatggaaacatcctctgtaagctggagtaactagtatgggcctctgtgaccgtgtgtgtgtgtgtgtgtgtgtgtgtgtgtgtatgtgtgcacgcatacgtgtgctgagggctgtgtctacagaccccacgaggagggcagagtcatccggagagcccgggtgctgattctcaggcccttgttctctccccgtagagggccatccgcgtacgcagccactccatggagaccatggtgggcggccagaagaagtcgcacagtgggggcatccctggcagcctcagcgggggcatctcccacaacagcatggaggtcaccaagaccaccttctcggtgagtgctggcaggccccggggcggcaagtgggtcccagggaggccccccccagacctatggaggaagagtgcccccacccaggcttgggcaggtgacttgatcagggcaagctggatgatggtgggaaactgaggctgcttgggggtgaccctgacccctgacctctgaaaacggtcctttggagcctccatcctagacagcacccggggttgacccagatggtgctagaagccctcctgtcctgttctcttgagtttccttgacagctagacctcctcctcggggccagccctgcagtgtggtcctggggtgtgttttgctgctcaggggctcgggacccatgactgtgagaggggtgtccttgctttgttattattaatggcagcagtagccaccccagcttactgtgtaccaggcactgagctgagtaacctgtagacacaatctcacctgcttcccatagcagctgcccgagatgggtgctgatgtgttctcctgttcccatttgaggaaaaggaggcccgctggggctcagtaacttgctagaggccactcagctaagcttaagagctgggatttgaggccgggcgtggtggctcatgcctggaatcccagcactttgggaggctgaggcaggtggaccacaaggtcaggagttcaagaccagcctggccaacttggtgaaaccccgtctctactaaaaatacaaaaattaactgggcgtggtggcgggtgcctgtaatcccagctactcaggaggctgaggcagagaattgcttgaacctgggaggtggaacttgcagtgagccgagatcatgccactgcactccagcctgggtgacagcgagactgtctcaaaaaaacaaaacaaaacaaaacacaaaatcaactgaatttgaatgcgattctgctggatccaaagtctgtgctgttcatcaccatgtgtacagttcccaagggaagggtcctgcaggcctgtgagtttgggcctgattgactcgtaccaggggctgggaaggggagggaatcatgtagttgggcctttcataaagcaaagtgggccgggcatggtggctgaggagggtggatcccttgagtccaggaattcgagaccagcttggggaacaaagtgagaccccatctctacaaaaaaatgcaaaaattagctgagcatggtggcacgcaccagtagtcttagctacttgggagactgaggtgggaggatcacctgtgcctggggaggttgaggctctagcgagccgtaattgggccactgcactccagcctggatgtcagagtgagaccctgtctccaaatctaagtaactaaagcaaagtggctttggatttgtatagactaggattttcctttcttttccttcaaaatagcagaacatactcaccatggaactaattatgagtattataaatggcctcgcataattaatttaattgactaaatattttcctagctattatcttgcttccccctgaaggtgcatggcgtgagcagagcagggcctcatctccatcctgtggatgaggagactcaggtcgggtctcattgctctcctgaggtgccataacatgtgcatggcaggagctggggcctgagttggaggcttggtggcctctagaggttggttccaggctcccatctgccctcctcaaacccccaccactcattgtccactgtgaggccaggcagctttccaaagcagaaggcgtcttggctgccgccaaccgcccattggtgcctgtggccctggctctgcggctctcagcctgtcttgttattggaacgcctgcgcggctccatttgtttgcgaggaatgaaggagagtcaggagtcctcaccctgccagtgatttgctggaagacctttggtcttcagcttccttgccggtaaagtgagaggttgaaccaggtccctccagggcctccctggctctgtgcctctcagcctgtgtcccccggaattgttctgaccttctcaatttggtgggcctggccctgtgttcctccaacagttgtggtctttggtggatcatgacctgggaccacaaggtttggcttaacacagggaaggaggctgtgactggcctgagtctccaggtctcagcttcagttacatagatctcaaccttcctagctgtcttgctattttctggggtctcttccagaccaggagccatttgtagaccagggaggaggatgaggggataggagatcggtgtttgggccgggagcactcattttggcaatttcatcgacagcctccagtggtggcggcaacggtgaagaaccagtcacggagtcccatcaagcgacgctcggggctcttcccccgcctgcacacgggctcagaaggccagggcgacagccgggcacgatggtaactgttgggaaacccctaccccagcctgacttgcggggtctgtcaaccccctccactgctacagctgttcagtgccctaccttgcagggaggagctttgctcagctttaggagatggctctgccttcaggcacctgtgtgtcccctgtcactcactcagctctttatccaaagaggcggacttggccagtctctgcctgggaccttccagagttactcttgccgcattttgacccaggctagaaacattgcttggattcttgtttctttgcctcctttttcaacgctcactcaaatggcctgtcttatgggagccttccctgattctgccaggcagagttagttgcaccttcctctgggcttctaaaaggttctatgcttttttctttttaagcaactcatatattacattacattgaacctgttcttggtaattgtctttctgattcttttaaaaaaatgaacacacagtacttgtgcatatttttggggtacgtgtgatattttgataaaatgcataatgatcaaatcaaggtaagagaaatatccatcacctcaaacattgatcttttgagttaggaacattcaaattcttttctagctattttgagctatgtaatacattattatcaactatagtcactgtattgtactattgaacactagatcttatttcttctatctaactgtatttttgtacccattaaccaacctcccttcatcctgccctcccccgccccttcccagcctctggtgacaccagtcaactttctatctccacgagattcacttttttagctcccacatatgaatgagaacatgcgatatttgtcttttttttttttttttttttttttttgagacagagtctctgttgcccaggctggaatgcagtggcgccatcttggctcactgcaacctctgcctcctgggttcaagcagttctcctgtctcagcctccctgagcagctgggactacaggcgcatgccaccacaccggctaatttttgtaattttggtagagacggggttttgccatgttggccaggctagtctcgaactcctgacctcaagtgatccacccgccttggcctcccaaagtgttgggattacaggcgtgagccaccgcacccggccacggtatttgtcttttcatgtctggctttcacttaacataatgacctccaattctacccatgttgctgcaaatgacaggattacattcttttccatgggtgaataatatccattgtgtatataaaaaagattttccttatccgcttatctgttgatggacactcaggtgggttctgtaccatggctattgtgagtagtgctgcaataaacatgggagtgcagacctcttccatgtactgatttcctttcttttggatatatttaccctgcagggggattgctagatcatatggtagctctagttttagtgttttgaggaacctccaaacactgtagtgtctgtagtggctatgctaatttacattcccaccaacactgtgagcatttccctttctctgcatcctcaccagcattctcaattgcctgtctttttgataaaagccattttaactggggtgagatgatagcttattgtggttcccgtggtgggggcagatgtcacagactccaaattattaaagacaaataataacagatgtcaggatatggagaaatgggaaccctttttcattgctggtgggaatgtaaaatagtgcaactactttggaaaacagtctggcagttccttagaaggttaaacatagagttaccatattaccaagcaattccgctcctcggtatatacccaagagagttgagaacggttgtctgtgaaaaaaagtttacatttacatttctttgataattaatgatgttgaatgttttttgatatacttgtttgctatttgtatgtcttcttttgagaaatttctattcatgtttcttgcccttaaaaaaatcacattatttgtgtttttgctattgatttttttgagttcctcatatattcaggttattaatccttgttggatggatagtttgcaaatatttcctcccattctgcagattggctctttacttggttgattgtttcctttggtgtgcagaagctttttaacttgatgtaatcccatttgtctatttttgcttttgttgtctgtggttttgaggtctcatctaaaaagtttttgcccagacagaccaacgtcctaaagcatttccccaatgttttcttttaggagtttctttgtttcatgccttagatttaatccattttgatttgatttttatgtatggtgagagagaagggtctggttttattcttctgtatatggttatccagttttaccagcaccacttactgaagaatgtatattcttggcacctttgttgaaaatgaaatgatcatgtggtttttgttctgtatggttaatgtgatgtatcacatttgttgatttgtggatgttgaaccatccttgcatccctggaacaaatcccatggtgaattgatcatggtgaatgatctttttgatgcattgttgaattctgtttgataatattttgttgaggatttttgcatctgtgtttatcaggagtactggcctgtaactctctttttgttgtatccttgtatggttttgatgtctttctgattctttaattgatgagcccatttgttctttatttcagcagccagcatttcttgagtggctgccatgtgctgggcacagtgctgaatgctcagacaagtgctacaaaacatataagcctgtcctccagaagttcacagtcttgtaagggaaagggcggcatttggttgacttccaaattcccaggttttctgcctatagccctgggtggtggcaccatgttctgaagtagggcttgcaggacaagaggcagggttatggagaaggatgaaaagctctgtttggaacctgtgcatgggagtttttgtgaaccaacagtagagatgtccagggagtggtcagagttacaggtttttaaaaatttttattttacttttttcttttattattatactttaagttctggaatataagtgcagaatgtgcaggtttgttacataggtatacatgtgccatggtggtttgctgcacccatcaacccgtcatctaggttttaagccctgcatgcattaggtatgtgtcctaatgctttccctccccttacccccaaccccccgacaggccctggtgtgtgatgttcccctccctgtgtccacatattctcattgttcaactcccacttatgagcgagaacatgtggtgtttggttttctgttcctgtgttagtttgctgaggatgatggttttcagcttcatccatgtccctgcaaaggacatgaactcattcttttttatggctgcatagtattccatggtatatgagaggccttgaatagagaaggagagttgggaaccaatagggtagaggtactgattaacgattgcttaattaatatgaccactggagaggctcagtagagtaccacatttaagggcaggtggagaagggaaggtggtgaagctgactgggaaggaaagatgagagaagaggaggaggggatggagtctctgaagccagaggaggagaaattccaggaagggaggacatctgtgtcagacacacagagaagtccagcaaagtgagccaaacccctggacagattgacaggaggttattagcaacctcatcaaatgtgcattgagacacttcacacctctaggatggctttaatcaaaaagacaaatagtaacagatgtcagagaggatatggagaaatggaaacccttgttcattgctggtgggaatgtaaaatagtgcaactactttggaaaagagtctggcagttccttacaaggttaaacatagagttaccatatgaccaagcaattccgctcctaggtgtatacccaagagagttgagaacagtgggccatgaaaaaaaatgagtccactagtacaactagtgtacagatactcatggcagcactatttatcatagcccaaagtggaaacagtccaaatgtccattgtctgatgaatggataaacaaagcgccatctatccataaaatggaatattattgcagtaaaaaggaataaagtcctgatacaagctacaacatagacagaccttgaaaacattatgttaagaagccagacaaaaagaccataacatattatatgattctatttacatgaatgtccagaagagtacaatctacagtgatggcttcgggattgggtgggagttacagggagaggactaggaagtgattacaaatgggtccagtgtttcctttaggggtccaaaagtattctaaaatcagatggtggtgatagttgcacaactctgaataaactaaaagccattgcattgtatactttaaataggtgagttctgtggtgtgtagattctgtctcaagaacactattatttaaaaagtacattgacggccaggtgcggtggctcacgcctgtaatctcagcactctgggagcccgatacaggcagatgacttgaggtcaggagttcgagaccagcttggccaatgcaatgaaaccccatctctactaaaagtacaaaaattagctggccatggtggtatacgcctgtaatcccagctgcttgggaggctgaggcaggagaatcacttgaacctgggaggcggaggttgcagcaatccaagatcgcaccactgcactccagcctgggcaacagagcgagactcagtctcaaaaaaagtgcattgaggacacggccatcccatccccaacagccagcacagggagcactgtgggcactgtccatggtctttgttacactaaaggagaaggatattgttggctgagagtaccccttgcttcccagctcccagggcagcctcctcatgtgggaccaggagctcgtattctagtctatatgaaggatggccccccgggacttcccaggagtccatgtgtattgggtggttcctgcggtgggggcggatgtcatagactctgccatattccctgctccattccccacggggccctctcttgacccacaactccgccaggtgtgatggccagcttgggtgagagagatctgggctagaggccgtcaagccaggactcctgcttggcagctctggacttcaccatgaacctagaatagtccctgttgtagggaccgggaaaccctgtagtatgccgccatctctggggggctcaggtgggaaaggacatccaggcagtgatgccaggcgggggcgctctgaccccactgcccctcaccgtgccgagagaggctctgcctggggccgtggatggggtgggggttgagggctgtctccgcggcctcactcctcatttccattccctcagtgacagcacatccagcacacccaagaccccagatggtggacactcctctcaggagataaagtctgagacctcatccaatcccagctctccggaaatctgccccaacaaggagaagtaagagagtgagggtgggaaaggccagcttcggccacgtggagccctggaacacgccctctgcctcctggccagctgagagtggccatctcctgcctctggaactctccagaacacaaaggccgacgggtgggggcgtggggagccgccagaggtcccggggaggaccctgggggtggagggctctcgcgtgtgacccgggctggcctcacttcctattccctgcaggcccttcatgaagttgaaggaaaacggccgtgccatctcccgctcctcctccagcaccagcagcgtcagcagcactgcaggggagggcgaggccatggaggagggcgacagtggggtaggtgtgccccgtccacccttgggcaggcactctggggcgtcagccagccaccctccttgcattaaaacggcactgtggatcgaagcccatgtcagtctttgcagaggaaaggggaagaatggaaacgagaggtgggctcgttggccatcaccaccccctgggcgcagtgggtgaggggacctctctctcagagtgacatagcagcagcagagggcaggggccagacccgatggtgccctgccttggggttcctggctggagtggtgagtggccagtgccccagggggctgggtcaaaggtccttcttggagcaggatagcttggaaccagggttgaagtcagcaggaaagaaagagcaggcccaagtggggagcaggaggcagcggctgtcctgggcttttgggggctgcctcaggcctgcgtgggcgcagctgccgagggtgggctggcctcgctcaccctgcctctctcctcagggcagccagccgtccacgacctcacccttcaagcaggaggtgtttgtctacagcccgtccccgagcagcgagagccccagcctgggggcagctgccaccccgatcatcatgagccggagtcccacaggtcagtggcatctggtggtgtgtgtgacgtcaccaggagggcaggctgtgccctgtccactgttagcagggccccagccacgctgaactggccagttttcacccctcctcccagctgtgaggccctccgctctgtgcgcccgcctcttctgttcatcagccttaagatgcccaagttcctaagctcttcttacactgagagttgtgaagctgaggcagagagttgaaggccttgtgggagatcccacagcggaggagtcgggattggcagtgggaaagctgagcactttccattagcccttctccccacctgccagtgctccaacccttctccccacctgccagcgctccagggctgccagggcccgtctgtcatgtcgggggtcttgataatacaagacgggggaagggctgcagggggagggaacagcatgtggaaaggcccagaggagaggagagagcgggtattccggaactgcacgtgttcatggcagctgggttcacagagccaggcgtcagagaggccggagcgttgacaggctgggtcagccccgggccccgggtgaggattttgttctgctagcggccactgttggagtgtttgaaggttcttaagtagggaagcaccatctggagttgagaaagtccattttggctgctgcagctgctgagtgtagaatggattagtagagagcaggagcagaggggagggatggaggggaggggagaggaggggaggggagctgcggcagaagcacctcggttcaggagagatcaaggaggtaaaatgtacgggctcagtagcaggggttcagagagagcaggagtctgggcgttttggggttctgtgatccctgcagttggtcagaataggggggccagcacctgagggccgttcaggtagacctgtgcggtgggcactgctgggcgggtgctccgggtctctgccctcgtgagggcagcacaggactttgagcctgggtccaaatcctgggtctgctgcttactagacatgtcattgggcgagtcaccaagcctgtctgtgcctcagtttctccaagcagaaaatgaagggaggggaagagtcgtgtctgcctcagagggttggttgtatgaagatgaaaggagctcatgcttgtacgaggcctggaactgttaacctcggtgttggttaaagaatgggaatgagacaatagtgtagtcagcggttctgagccgggggcagtcttgctaccccatggatgtctggcaatgtctggcgacatttttaattttcacaattttggaggggtgctactggcatctagtgggcagaggtcacggaagctgataagcaatgtacaggacagccccctagccacatcagacaaataattctctgaccccaaatgacattcggttgaaaaactctagtctcaatggtagaaacacaggaagggccaacaggccttcagggtggctgaagccaaaatgttcctggggttcacacagcgaagggatgttgcaaagggaacctgcagggtcagagatgaagggaagatcgtgattccacagccagtgaccctttgcatgcgtgtttctcagtgagtggaagagttcacgtgcctcctctcattcagccccctgtggttgggcagctgcggagctgggttcaaatcctggttgtagcattgacaggtccacgtctctgagcctcagtttcctcatctgtaaaagggggtggaaatacaaattccctgattttttttcgagatggagtctcactctgccacccaggctggagtgcaatggcgcaatctcggctcactgcaacctccgcctcccaggttcaagtgattcacctgcctcagccttccaagtagctgggattacaggcatgtgccacatgcccggctaatttttttatttttagtagagacacagtttcaccatgttggccaggctggtctcgaactcctgacctcgtgatccacccacctcggcctcccaaagtgctgggattacaggcgtgagccaccgcgcctgacctggtgtttttgttttgttttgttttgttttctaaataagacttaaatattgaaggaatgaatgaaagaatctgtaagcaagcctggcccccacttggtgttaaataaacgtcaaagtaaggaaggttttgagtaaaggaattagagagtctctgcaggttgctgaaggtcaccgagggcggaagggacctggagcgggtctggtgacttatggccggtgcttcccacaccacacggtgaggctgcctcttacacaccttttctccacacagtatttaaccccgatgggctgcttttcacccccagcccacgaaagatgtgcttggtacccactggatcagggtgggcttggggggatctgggaaccggtttcatgctgtttggctgagtctggggagaggcagggtggagtggggagaggtggcctgacgtcctgacgtacagtctccataatgtcagatatctgatcatggtcatttcctacctgggcttcctggggcacagaagaggactgataggttacacagaggtgttgtagccctgggtggaactcctcgattcgaagcaccacgaaccagccagcagcttccaggaaggctgcactaagctttccataccctcggccagaggacagccagaaagtcaagtggccctcctgccagcggggcacagcgggaaatgttgacaccgggctctgccaccactcacacacacttaacggaattttattatacgatggatgtcaaacccagtgtacaaatactagataatattctttaccataagtcccatatgtccaactgattctcacagaatgcttttagtggtgtttgcttcacctttttatctgtagccaacttaaggctgcaggagatgaatgtgtgtaattctgacatgaatgtggactgatattaccatgtttgttaataagtattttatatgtatatattatatatacatatatagtatatacatataatatacatatgttatagatacacataatatacatatatgtatatattatatatacatatatattatatgttatatgtatatacatatgtataatatatattatacacacacacacacacacactcactctcatggcgcccggccatgagtattttgtattaagagaacttcattcgtcagtgacatgagtcatttccttgctgtatccgagaaaagttttcaaaccccggaaggatatttcctcagttttcttttgtgctattcacaatgtaatcgctgcagacacagcatgttttgaagtttcatgtaaattcctttttttctattagttccttaagtctagacaacaaaacaatcaatcaagtcatgatttgtagcatgtaccagtttctgtggtgtaaatacacttgtcgtggctgatctcaagctactgacgtgatgtcctcgaacgtggacttgggaagaagatatactgtagccaccatctttagggtgtttctaccacatggatacaatagacgtaagagcacagataatcgtaaaacagagaaaaataagtaggaagtgacgaatttcaagtatttattacctctgttgaatataatttattgaactgtaagcttatatataattcaactttaaaaaatggcctgagttgaacaaccagctcaccacaattctataatctaggagttggctctcgtgggtcggcacaggtcagctagggtgcctggtcctggtggagggcaggaggcccccttcccctggcctccctagccagtccccacacacagccccagtggcctccacagctccaccctcctttcatggccgttctttttcttagatgccaaaagcagaaactccccgagatcgaacctgaaattccgctttgacaagctcagccatgccagctctggtgcggtaaggatgcgcctcccacaccccacactccactttctgcagaggcccagccttccttcctgaggccagaggaagagggttcagacatcccagagggggctccccgaaggaggcaggggaagctctggggacgtctggctccagcaggtgcaggccgtgtctccgggttccagccacctttgccacaactcccaaggtggagctacacctctggacacggccaggcccagatgtgaggtgggaggtgctggttcctgggtcccccagtcccttcctgagctctccagactatcgagagctccaggcccagttgtgaggtgggaagggctggttcctgggtcccccagtcccttcctgagctcaccagactatcgagagctccaggtccagatgtgaggtggaaggtgctggttcctgggtcccccagtcccttcctgagctctccagactatcgagagctccaggtccagatgtgaggtggaaggtgctggttcctgggtcccccagtccctttctgagctcgccagactatggagaactccaggtccagatgtgaggtgggaagggctggttcctgggtcccgaatcccttcctgagctcaccagactatcaagagctccaggtccagatgtgaggtgagaaaggctggttcctgggtcccccagtccctttctgagctcgccagactatcgagaactccaggtccagatgtgaggtgggaagggctggttcctgggtcccgaatcccttcctgagctcaccagactatcgagagctccaggtccagatgtgaggtgggaagggctggttcctgggtcccccagtcccttcctgagctctccagactatcgagagctccaggtccagatgtgatgtgggaagggctggttcctgggtcccgaatcccttcctgagctcaccagactatcgagagctccaggtccagatgtgaggtggaaggtgctggttcctgggtcccccagtcccttcctgagctctccagactatcgagagctccaggcccagttgtgaggtgggaagggctggttcttgggtcccgaatcccttcctgagctcttcagactatcgagagctccaggtccagatgtgaggtgggaagggctggttcctgggtcccgaatcccttcctgagctctccagactatcgagagctccaggtccagatgtgaggtgggaagggctggttcccgggtcccccagtccctttctgagctcgccagactatcgagaactccaggtccagatgtgaggtgggaagtgcttgttcctggggtcctgaatcccttcctgagctcaccagactgttgagagctgagtgcacagagccgccgtggaagggacctgtgctgtctggttatttaaactcctgtatggatttttgttgaaacagggtcactaatgtgaaagtggagtccttcgcctgtccaaggtgggttgagtgaatgtcctgctgtggccgtgaggggggacgtgtgtttcttttagatcagggaactagaggccttgtaacctcagaatggccggagagatgccgccagctggggatgtccaaagagtctcctactcgcccctgaagacctgcaatggggaaggaggggcagatggcctgtgtgcggatgggaagggggttcccagtgacactggactagacgtactagttaggcctcccttccaccgatggggtctggttcccgcaggcagaaggggagtcgcccaagcccgcttctgacccaggagggaggagttcctgagggctcccttgctcccctgccctcaggcagctgttccctccttgtgtctttggcggaggccctgggctgaggtgtgttctccctccctgtcgggagtcagcactgtgagggaccaccccaggaggcctcttcccctgcctgctttgagggggcacgtggtttgagcagagtggccgtgggtccagctcgcccccatcaaggcctggatttctgctggggaagtcaccagagacccatctgagctcccagccctctccccacatggggcttcaggggtcagagtcacagctggagccaagaggaggggtacaaccgaacccactctgtgttcaacctgatttatgaaaaagcagaagacaaatgggcatatggaccttcacccccggctcccatcacgcactctggacgccactgcccaccaaagccgtggctatgcgcagcttctcgggccacgcaaggtggggcacccttacatcaggtgccctcctgctcctgagtgtatccagtgagctgtagccatgggcaggcgtgttccccaccccttgctcccgacgtccgcgtcgtcccctccttcctgtacggaatgttcgctcatcgccgcctcctccttgtctcctcagggaatcccctcttctgtcctggaaaaggctcctgtaccagcagtttgggagtgccgtccacgaccctgacagtcccagccctgctgccccatggccacgtgcccacagatgtgctgttggtccaggtgtcccagtctggccacagccctgcctccgccctcacctacatgccctcccagcccctcccatctctggacgaggcctccttcctcaggttcctcctgctcctgacctcccagtgtgatgtccgggtcctttatcatcctattcatcctggagaggaaaagtgtcgggcaaagggggatctggggggagctcagcagtgactggggagctggtctgcctcagagacagagtagggggtgggagcagagcctcggtgagggtcttggccacagggcagtgccttcctgaacgtggcaggctttactaccaggaacgcactcggtggtggaggccccatgttcccaggagccaagattcgtagcatccttgaggccatcctgataaaattcggcgctattgcccccgtagctctggagctctaaaccgtctatctgcttctgtgctgaacgcctttcccatctgctgacgtaggcccagggctgccctgcccctgctgccagtgtaccgtgagcggggctccagccagttcaagctcagagccagagctggacgggccagaactgcgctgcacacttcctggactgaggcggggactttgggtcccacccggtttctcctgattatggctgctgtggggtgaggggagggaggggcagccccgaggcagtctcttccctttgagaagatattttcccacaaaggggtgggaagccaggagtgagaaggaattcagggagagcaaaggagccagtgctgagatgctgctgtgttggttgaggaaaacctcgggcctgagggccaggccggagcccaggtctctgctgacaatgggggttcaaggaagacgtcgttatctcccctccccacttactcgaggagagaggtgagggggggatgacttgcgggttctgatcaggcccctgggtggggaaggggcacagtgtccctcagcagcttacgcccctggagtcttggggggcccagcctggccctggggccttttccagctactgtgcccttgggcagctgcgtctggggctcaaccccccaatcctgttcccctctccagctgcgggtctgtaggcagctgtcacatctgaagggtttctgcaacctggaccccatctgggtgtgggtcagaccctgtgacccacatgccacccccaccctccacagagcccccttgctgggacagccagctcacctccaaggacatcccctcctggcttctcccccttccgagtctgcagcgccgtgggcttctctgccgatgggcccgggttggggttaaggtgggcatcctccaggtacaacgagcctgaagagcccctttcagtgcagacggggctgcagagtgacactggctgggcacctgccccacgaccaatgacaaggatttccagctgaatgctttattcccatagggatctggacctgtgcccaagatataaatactacactttttttttttttttttaactgacattgtgaaattctccctatagcttttgccattcaagcaacattgtgatctttcttccccgccacgtgtgtgggaatgattgagtcctgtttgcaagctggagaggagctctccctttgctagtactttctctaaagtactagtctagtaaaatttattcttgttagaaggtcaacaaaatatctgtttagcttttatgaagagtcaccgtagcagcccccacggctggaaagaggcctgtacgttctggacgcgttttgttggctgggcttctggaggcactggcaaggtcaaactgcatttctttaagaacagttgcaggatctggctcgcctctgtgggaagccggcattacaggtgcttggtggatgggccgtgtcacattgccatctggggtcctttggggtttccaggttgtcaccatgctgtcccatttgggaatcccatacctgcctgtccccactgcgctggctgacccttgctgcctgctgcctcttgggagggctttgtccctgcctctgagctggtgggcaggatggctgggtggcccccagagaagcacagacctgagatggggtctccatgcccggtttgctgttggaatgatctgaacaggaccccaaatgcctcttccctctggtcatgcctcactatctctaggagctccatcctgtggcttccagagtgtgcacttccagcccacccgggcagtgctgagagggaggaggagaacaaggatggcccagcctcccctccctcccctagaccacggggcgggcagctcgggttcctggagggctgtttcccccacgctgtccctacatctgctctgatctaaaatgtctttccttttatgctgcgcccagtcttggggctcaaagatttgcccaaacctcattggccctcgtgactaggctcatctagatggtgctcacgctggtgtttgaggcatttccactgtgatctccacgaggggatgttttccgggacacatctctggctctgggaactgcctgactcactgaagaaactacttttcaggcactgtagggtcacccatatgcctccagctcagttgacgcttaaaaacaggtgcagaaaagctcgcgatggaaggtcttaatgagagtgtctgtctatgccaatcatgtaaaatgacgtttcttgaaaaagattcagtggttcagctttgtcagcatcatctcaacacaagcctgctggctctttttagcatctcatccaaccatgtcatcgtccagatgagaaatcttagcccaggtgaggggagtaacttgcttgaggtcacacagctggctgttggcaaagctgggattagaaccctcaacccagggtcccttcctctgcagcgcctacatggttggttgaataagtggctgcgtttcctggggccctgggttttggggaagccagttagctgctgctttggcactggcatggaggtgagcagtcaaggatgctggtgaggctgcagtttctgctctttttcatcaggggggatagtctctaggatttttcagtgaggacccttgggctttggatgcagcttgaaccaagaaaacgaggagggaaagggattcagtgaactattcctcagtgggatcggttcttcagctcctgatgggggctgtgtaatgggggcagaggccagggaaaaagatgctgttcacccaccctcagcttcccttttcctaaattaagaggaaaagtggtcaaagaaaaactcttcatttctccctgattcttaaacgaaggtggttaatagaaactcaggctcccgtgacaaggcaggacaagagcctgtttcgctttcctccctgaccctgccaggtgccaactcaaacactacctttctcattggtttctaagtcagtagagacagatctgttttaagcagttgggggttcgagtagatctcatgggtacaggaggccagcagggaccaggccagtcagccatgctcaggacccctcggctcctcccccagcctctagctaccctgtatcgaggcaaggggaggccagtaaagtttgccaagcctgatcctgcagcctggtggggctggctggggtattcttttaccaaactctgttttaccgccagccccttgtacaccccaatcccatgtctccctcccttcagctggaccgtgtgcccctttgggaggaagaagacaagccccactagggccaagggcagcagagccctgccgagtgagaggctgtggggcagcggctctgtcctgtgccttaccagccctggggaggggggcatttggctggaagactggaatttaattgccatcgtctttgattttgtgacatttctgcttggaagtgtgaactacccccccccccccgcttcctgctccttagcatgcgtgcagctctctcctgttttgggtgttccccttggacactccagctcggggactgctggcgtgtgaatgtgcagattcccctgtgtggtcgaacctaagaactgtggcttggaagtgatgctccatgtgacgacgactttgctttctttcctcttagtgaggaggtgattcgtagatcccaactgcctatgtaatgtaaataatgtacatttaatttattgctatggtagcacattgtatttgttaatgtacaaaacaaattctaaaaggttgacaaatgtatattttgttgcttaaatgtgtctttgcagaaattgacaataaataacatattttgtgtccatcagtgttcagagttctttgcatggggccctgggcctgggggtcactgttcagttcactggaagttgcatattctctggccaatagatgtgttactttagtctgagatgtatttttaaacatttacattaattgttgatgtttaaaaaactgacgacaattagaaaagtggccgggcgtggtagctcccacccagaatcctaacattttgggaggctgaggcaggaggatctcttcagcctaagggtttgagaccagactgggcaacatagtgaggcccgatgtgtaccaaaaaaaaaaaaaaaaaaaaaacaaaaaacaaccaaaaccccaaaaaacccctaaaaaattagctgggcaggtggcacgtacctgtggtcccaggtactcaggaggctgagatgggaggatcacttgagcctgggaagtcaaggctgcagtgatctgtgattgcagcggtgcacaccagcctgggcgacagtgatactgtgtttcaaaacaacaacagcaacaaaaaagctctgcgcagtggctcacgcctgtaattccagcactttgggaggctgaggtgggcggatcacttcaggtcaggctttcgagaccagcctggccaacatagtgaaaccctgtctctactaaaaacacaaaatttagccaggtgtggtggcaggcacctgtaatcccagctactcaggaggcaggagaatctcttgaactcgggaggcggaggttgcagtgagccaagattgcgccactgcactccagccagggcgacacagagcaagactctgcctcaaaaaaaaaaaaaaaaaaaaaaaaagaaattttacataaatcccaaattctgctgcttttaaaaaatcagggccgggcgtggtgtctcatgcctgtaatcccagcactttgggaggccgaggtgggcggatcacgaggtcaggagatcaagactatcctggctaacatggtgaaaacccatctctgctaaaaatacaaaaaaaaagtagccgggcgtggtggcaggtgcctgtagtcccagctactcgggaggctgaggcaggagaatcacttgaacctgggaggcagaggttgcagtgagccaagatcgtgccactgcactccagcctgggtgacagagggagactctgtctcgggaaataaataaataaataaataaataaataaaaatcagatgctgaatctactcctcaggcatgagttggttagagttcactggaatctttcccttttgactgggaccttgagtgtcccacagtctccaccgtcccctactgtttacacctggaagatttcactcattcctgttatctgttggtctctgtcatggctgagtttgagagcctggctgttcagtgattcgtgtccatcctgcggtgttctccctctgcctgcttctcagattcctcactcactccttccaggtttccctcacggttgcatgctctctcttcccgtcctcctctgactcctgaatggccctgttctcacatacactttgctttacactgcttggctgtacagcttgaagtaatatctgcattttttttttcctgaataaatttgaaggcaaggaacaggtgtttaagaatctgctgatcgagcgcggtggctcatgcctgtaatcccagcactttggaaggctgaggcgggcggatcacttgaggtcaagagttcaagaccagcctggccaacatggtgaaaccccgtctctactaaaaatacaaaaattagctgggcctggtggcaggtgcctgtaatactagctactcgggaggttgagctgcaagaatcacctgaacctgggaggcagaggttgcagtgagctgaaatcttgccattgcactccagcccgggtgacagagcgagactccatctcaaaaaaaaaaaaaaaaaaaaaaaagattccgccatgacttccttttgtggtcttgggcaaattcattaactccccatgatttgcattttcttttgtgtataattagaacaataattcacatagctagcatgaggagaaaaatgaatttattgggaaagagctttgagaaatggcaagtgttatgcaagcaccagaggttcgataataataataatacgagcaactgacactgaaagctcaccatatgctcggtgttttccctgggttgtcagttctgttatcacacaacatggcacttcctaaacatacaccatgggagatggtgcaaccacagggcttatggcaaacaatggggttagggacgtaacactcaaacactttgtcagtgacgtaaaaataaaaagacaggaacttgataacaattttacacgtgttaaatgattgagaaatacataagggctacaataaaggcagtttagctttaataagatgggaagtttgcttgtggaatcggttgttggcaggttgtgaagcggtggaaagagagcttttctgaaattggatggacagtaacagcagaggtggatgggtatggcccccggcacatggtgtattgaggcagctggcagatgttggaggtgtatgtgtattttgtgtgtccctgtgcagcttgatttagctggctgccggttttggcactcacctaatatttctcatggatgaggagcgtaagctaaagggcaacttccatgatactccgattgtttcctattatatcaactacattggactccatttccattttcaacacaactgccgtagcagaactcactttttttttttttttttgagatggagtctcactctgtcgcccaggctggagtgcagtggcacaatctcagctcactgcaacctctgcctcccaggttcaagcaattctcctgcctcagcctccccggtagctgggactacaggcatgtgccaccacgcccagctaattttttgtatttttagtagagacggggttttaccaagttggccaggctggtctcgaactcctgacctcaggtaatccgcctgcctcggcctcccaaagcactgggatgacaggtgtgagccactgccccagcccagaactcacaatgatcatctaatttagtcatctgaaaagcccacgaaggcatgtattattcccgtttcacttaagggatcagtttcaaatttcagtttgggatccaaatctcatatgctgagctcaatatgaaaggaagttccagacttggaaggttctagatgcacagaaatgtatcaggaaaagtgcatcctggctctctctggtttccctgcccagcttggagcccctgtcctggaacccatgtgtccagcatcccacgcttctgccatcatgctgtgccaagtggtgcctgtctgagcccacggttacagatgtcttatttctcgggtgttagattccacctgttgagtccccttggctgcaagtcaagcttcatctttcacacaaactctctgtgcccatctgtacctcacggttcggctgcttcctgggttcaacccttcctcccagaaaatgtgaggttacctatatctggacactttgtggaggtggaacatgtcctgtctctgtgggaaatgtaggaggcatggaagtcatcagctatgctggtcggtattgtccctccaagcctgcaggctctcctagggttctgaaagctccctgatcggtctaggtgtctgtggtcaggtgttctttctcccgaggtgggcacgcctccaggttggggctcagttttaggactcttaaaatctgttttttccactcagcgtctaacagcttgtagcagtcactggacattttgggggtgggggtgggggtgggggcactgttttgcctgctccgtgggggaaaagctttcatgaggagtctggtcagcccgcgctcagattttccctcagtctcgtttttggagtgctccctgtgtccagccatgccctctcccacatgcgctctgaccaaccttcggtgtcccctggttctattctaacaacaacattgcggtccagttccctaagcttgcagtgatcctcagttaatacaacagttattacaacagtctcttgtgtgttcagacgcagccctgtttgtggtaaacttcacattccacgcaaagcccttctcacccatttcctggggtgggcaagcctggtgggtacagatcttggcttgggacgtggcaaagacgccctccttgaccgtacttcagtcaggatcctctggccgtctcttcaatgaggcctcacactcgacctgtccttggtttgccaaggcagttttagcaaagaatcttataaaccagtgtgaatatcgccctgcccttgatatttgatcaagttgctcgtcccccacccttgatacctaggctcctcttagtaatttcccatctaaggaaactcctcactctgcccatcggctataaatctgcaactgtccctgacgtgtcaaagttgagttcagtctttgtcccctttgcagtagtcttgagtaaaatcttccttgcctatttaactctgtctggtgtgatttttctttgacaaatggctggtcagttctcacaccagtgcccctctttgtcctggtgtggtagggtggggtgcagaagggccaaaggggcatctcattttgatactgccccaggggagagcgctggtgagtctggggagtctgagaagcagacaccaagacagcgtcaacaaattattaggagaagggcctgtgagtgaaaacggaggaggtgggatatggaggaggctggaaaagctgtcaggctgtgatgcaggtctgaccctgcacggaggagagatgggagtgagggaggttgcgtgaaggcctcttagatggggtgcagttctaaggaaagttcagggctgggcacggtggctcacgcctgtaatcccagcactttgggaggccgagacgggtggatcacaaggtcaagagttcaagaccagcatggccaagatggtgaaaccccgtctctactaaaaatacaaaaattagctgggcgtggtggcgggagcctgtaatcccagctactcgggaggctgaggcagagaattgcttgaacccaggaggtggaggttgcagtgagccgagatcgcaccactgcactccagcctgggtgacagagcgagactctatctcagaaaagaaaaaaaaaaaaaaaaaaaaaaaaggatgagttgatgagtgactccatcgagtgaaataataacacaaagcagctcatatcaaaggactaataaaaacaaactgcaacataaccagctccacataaaaatgtacaaatgaatgatcatacacacaccagtgaggctgtactaggaaaggcacagacacttcataagaaagatggtagaacgcttgctcaaattattgggtcaaatgaattttatggatcctcctgcaagacattccattaaaaaattaaatattagaccagcaaggaagtctttatggccttgttctaaaatgccgattgttgggttttataagaacttatcactagtaagaaatatgaggaaaaatccagggaatatggacaatggggtccagataaaatccaactatgccactgaaagtgcaatagtgaatataatggaaacgattttaccttttttagttacagaattttccactaagaaagagagtttctaaaactaggaaggataaaactctagcagagacaaacaactgtaacctactacaaggactcagcaatgttaatgttatctgagattttaatttagtgacattttattgccagctagtattaactacgatgactttgttgcaggggttgaacccagttcaaactactttaagccaaaaaggggagcatttgttaaaaagatacaggagtgtctcctggaatcaaaggacagggatgcatctgtgccacatgaaggacagcaaaggttgtcagccctcaggcagtctcttgcctctgctttctgttttttttttttttggcttctgcttttttctctgtgcttctctgtatttattttctttctattgggttgttggcattgtctttatggatttgggatgactttttgtgtagctttattctttccttgaggaccagctgagctgatctcagcaccagattttcccttcactgtctggactgtgaaaatggatctgggcccttcaatatgtttcctttgtcagcggcaccgtgttgcgctttgtcagtagagggcgccagagagacactgcaggagggacagagttttatctcccggttctcccgtgcttgcttggcaacctcttaattcccacttggctcttgtagcacatgctgcatctgggggtctggttcctgcagggtgggcacctctgccagcaccaggttctttcagggcacacagcctttccagcacccctcccctgcccatccccagcctctccagtgcccaccccctgcagggcatgacacacagccgcgccccgtggctagctgcttctcctgccagcaactccttcctgtctgctggtccccaccacagtgccccagtggtcttgcagcacagtacctccagtgagacacctccccatgaacagagggtggattttcagtatgctttactggtgtggcaccacagcgacttttccatccagtgacccaaggccatccagggctggatcgtagcatagtcctggcggtgggggcgggcagctcttccttggatgctctatcttacccttaggggtggaggctgctccttatttccgctattcctgtatctgttagagttgtcttcgcttattagtagccaatccctcagtactccaatcccctgctaaagaattctttatatgaaaccttcctatgcaagttactgtgtggcttctctctcctgattggacccagactaacagagcagctttctcagtttctctggggagaacctttctgtatcacatgaatccacatctccctcatttaagagggagtccagggctagtgtctggttctattccagagtcccatgagggagactctgatcagcccaagagggtcaggtgatgacctcctactctgatcaactccacccagtgggctggacttgtgggtgccacagatagccctgtgggtgatggggggctgttaaagggttcttgtgagctggcacgttcccaatgggtgtctactacagaaccctgtttattaaagacaaaagtggtgtatggaaacctgggttatgctgataacctaaaatacctgaccatttcatgaacatgggaagagtagcagtgacgcgaaagtaaaaccgacattgcaaaagcttctactgacttttgtttcctgctgacttttaaaacaacatttatacaattttgtcagttgtacctcaataaaaccgaaaaaaaaattaaatggtacagcacaagaacttataagaacatttttctatgcaccagagcattttggttgaaattttttttttttaaatttcaatagcttctggggtacaagtggattttggttacatggatgaacggcatagtcatgaagtctgagagtttagtgcatccatcacccaggtagcgtacattgtaccaaatatgtagtattttctccctcaccccctctcaccctcccacttcttagtctacatagctcgttataccactctgtatgcttttgcgtacccatagcttagctcccacttataagtgagaacatatggtatttggtgttccattcctgaattacttcatttagaataatggcctccagctctatccaagttgctgcacaaaacatattttgtcctttttatatggctaagtagtattccatggttatatatactacattttcttttttttttttaaattatcctttaagttctggggtacatgtgcggaacgtgcaggtttgttacataggtatacatgtgccatggtggtttgctgcacccatcaacccgtcatctacattaggtattctactaatgctatccctcccctagccccccatcccaccgacagaccccagtgtgtgttattcccctccctgtgtccattgtttctcattgttcaactcccatttatgagtgagaacacatggtgtttggttttctgttcttacgttagtttgctgagaatgatggtttctagcttcatccatgtccctgcaaaggacatgaactcatcctttttttatggctgcatagtattccctggtgaatatgtgccacattttctttatccagtctatcattgatgggcatttgggttggttccaagtctttgctattgtgaacagtgccgcactaaacatatgtgtgcatgtgtctttatagtagaatgatttataatcctttgggtatatacccagtaatgggattgctgggtcaaatggagatcctaaaggaatcgccacactgtcttccacaatggttgaactaatttacactcctaccaacagtgtaaaagcattcctatttctacacaacctctccagcacctgttgtttcctgactttttaatgatcgccattctaagtggtgtgagatggtatctcattgtggtttttatttgcatttctgtaatgactagtgatggaattagttctcttaaccctattccctttcttcatcttcccaaaatataacagtattttgagttatgtggcagtcagtatactggtcattataatgatataaatcttgtttactataaaattaagtagaattttatgtcctttcttgtacaactttacgttttccctggaatgactaattaccttcactttaatttgccttcttcctcatatacacagtctcattttttcccttatgttctatgagggctactattttcctggtaccaaactcattggagcctgatttctttttgcttcaatttggccttgttactttctaggcctgcttagcacagctgtattccccagacttcttttttgggtaacatctgtgattttctggatcccatgaactccttgttcttgacttactcctgagttttgctggagctcaccccccagtagcttcttaaggaaggatggaagacaaatgtgttaagtcctttcacatctgaaaatgtctctattctcccctacactagatgactagtttggctggaaattctgtgttgaaaatatttatttccacagaattttgagggcatcactccgctgtcttctagcatccagagttaccattttgattcttgagcttttgtagttgatcatgtttttttttttgctgatctgttttttttttcccggaagtatttatgatccgcatatgccagcatcaaagacttaaaagatgttgtgcaggaaacaacctgttccctgcaagaccaaaggcaaatatttcattatatgcagatgttatgattgcatacttggaaacacaaagaatgtccattgaaaattattactaacaataagagaatagaatgtatatacagttgatctgaaatttgttgatatatcttggcatgagtttaaacaattgctttcattgttttggaccttcaatgattctttaaccttgatatatgtgaccttcaggttaggggcattttatgctatttctttgattttattggaaccttataattccatataaacttaagatcaagttttctagttctccaaagtctttttggaacttttcttagggtcacgataaagttttaatttagggagatttgacatttttattacatagaaacttcctattcacaaatatatctttctattatttcaagttttctttttatgtactccagtagaaatatatatatatatatatatatatatatatatatatatatatatataaaatttttttttctttgacatggagtgtcgctgtgtcgcccaggctggagtacagtggtgtgatctcggctcactgcaacctctgcctcccgggttcaagtgatcctcctgcctcagccttcagagtagctgggattacaggcgcctgccaccacactcagctaatttttgtatttttcgtagagatggggtttcgccatgttgcccaggctggtcttgaactcctgacctcaagcgatccacccgccttggcttcccaaagtgctgggattacaggcgtgagtcaccgtgcctggccagaataataaaatttttattgaatttattctcagttcttttttcttttttttgctgttattacacataggatatttttaccattatattttctgcctggttgtttgcgtacggaaatagaattaatttttgtatattgattttgcatccagccaactcatcctattctcttattgttcctaacaattttaatgggctctgtctttcaaagtatagaatcatatcacctacatatgaaaaatttgccttcgtttttccagcgaatggggtcttctttcctcaacatctctgatgctagcatgtaggatatctatagtcttctttccttttctttatttttttctgtatactcccagacaacacgttccacacacaaatatatttttcttccagagacctgactgaattctctagtttttaatgtttcttgattttcaagtataaatcatttcacctgaaataataatattttgttttcctcctgccccccagttttaaccgccttgccccctttgaagtcttatatcttgcctgggcgctccaaaacattacataaaaacggtgagagcaggggcattcgcatccagctcgactttcataggaatgcgtctggcgtttcaaacactgtgaggttcactatggttttctgagttgtcattaaattcaggtttgtttaattcctgttgactaaaaatttcattttcttttttttttttaattaccaatcaatgttacattttatcagcgcctttggtcatctaacggtctgataggccattgccattgcacagtgttcttctaacggaatttagaatcctagcttccgatgctttctcagaagaagagcacgggcggtaggaaagaaggacgctttcaggaaggatggagggcccaggacgatttcgctccccggtggacgtggagggcgggcagggtcatcctttctcctgaaactggggagccctacgaaggggttccggagaagacgcacggatctcgaatacctccccgcccggctgccactggatggcgcgcgcaacctgcggaaccacagggcgacatccagctgcgggcggcgaagggaattggagcgtggacctctccaggcttttcattcgctggttctgccggtgtcccgccttttccatctcctcattggctgtcgcctccgggcctgcgactttgctcagcccctccggggagtggaatcgggtgtgcaacaggccgtgaggtccggctttgcgaggaactcccattggtcagtcaaacaggagtcccaccctcctgggcttcccattggttgctgtcccaccgctgctctcagtttcccagcggctggggatctgggttttctgggggtggaggggtgcagtacgctgctggaagctcgtttctctttccaccgttgtgtgcctcgggctcgcggtcaacggggctggacgaggttcagaaccctccagagcggcagctgtccccggggtgggttgtgggactcaacagccctcaggggaaaatggcgggaggcaggtggaggtgtcttctttgcactgaagacctggataccctgctgcgggctgaacgggaggctggggtggagccctggctcgggttatggccggggaggagaccacgctgggcgagtgggaggcagccccagccaggggctggaagaccaagtaccggaccttcaagggccttcttgcacccgcatcccacagtaaacaggatacgtaggtgaccgtctagaaaacttgagtttctcttgacaagttgatgtgccagttttcgtatgcattcaaataaatatttagtaatttcaactttgcgcttttagcattttggagctagtaataaatattttttttctttcaggattcaagcattttatgaatccttggaaagtttataggcctgaggcacaggtgcctgtagtggctggtgcataaaactgattctgtctcccaaccatctcaaggcacacacgcactccaggttgtcatgaaatcgctgggttctgactcatgcaaaacagaccagtggctacttatacaccaggagaggctgcccagcctcgctgcagaggcccagacctgggtcctgttgaatacacatacgcagataaaaggctgaggtgacacacatcagaatgggaacagggagggctctagataataaaagtgaatgtagagtttgttttagaagccagcccaggactgggactgggtactgaggcagtggtctagtcacaagggcttgcgccaggaggcagagggcagggagagttggcaatgccacattggcaaactggcaaaagcggctccagcagtgtctcttgctccatgtttgggtcaccattctgttgctctgaactgtgaaccacaaagttaacacagagccttattgctacgtccaggtaatttgatatcgtatattctatgatctcacatggagacataaataggcttatgctgctgggccagaaaatctgtggaggaaacgatgaacatctgaaaggatacacatccaaactattaacagtggttactcatgtgatatcaaagtggacatgagaagtggaagggcgcagacttatttatttatttagacggagtcttgctctgtggcccaggctggagtgccgtggtgcgatctcagctcactgcaatctctgcctcccgggttcaagcgatttacctgcctcagcctcccgcgtagctgggattacaggcgccccccccccccaccactcccgactaatttttgtatttttagcagagtctgggtttcaccatgttggccaggctggtctcgaactcctgacctcaggtgatctgcccgcctcggcctcccaaagtgctgggaacaggcgtgagccactgctcctggccttattttttttaaaattttactgttgacaatatgctttttaaaaactaatacatatacatgaaaaaataagccatgtaaatggataattagtgataagtcagtctcctactctagcgggcgagagtcagttccagtcccctgttcccatttccagggggagcttctaagtgtcttgagcatccttcacaacatggtctatgcaaataggcacttttggatacacttcttacttttaactttctgcatatttgcattgtttgtttttgcaggcaagccgattagaaagccaattaaaaaacgtgtcaatgaatactcaataataatatgggttaagtaggatggggtttcgatttttttttcacactgaaatggcatcttaggtaccactgctgcgggtcctcaaaatatgcacttctcgtcattttcttaagagctgagatctggattctgtgtgtgtgtgtgtgtatgtgtgtgtgtgtgtgagagagagagagagattgttaggctaagaagatgtttttggctcatagctaagtgggttgcttgcctggtggtggaggaattgcaggccaggcagtgtgtcctatggccttggaatggacgagaaaggcctgggctccactgaaaatgacaagttgtttcactccacggtctctgctgcaccagagggtgcgtgtgccttcattcttcagctgctgttaaagcaaagctaggctgtgcttccgtggcagccctttccttgtattgcatttcaccttgcatgtttgtgtgagtgtagagactataatttgatatggcttctgaaggcttacagtcaggaagtggcagccacatcttgtgtcagttgactgtggcctcggtcctcttactcatccatcattcattcaacaagtatttatcaagcatttactatgtatgaaacaattgacccagatactgggaaaactggtgaacaaaaccagaatgtctaatcaggtgcatgctggctgggaagggcgagggtagatgctgagaggttctgcttttgaatgtttgatactgtgatttcccttccaaaaatacacagtgtcggcttccctcttgcaagttttacctcctaaattcctctctgatccttcctctcctttatgcttctgttactgcctcttcaggtgcttcccctcactttggccaatttagcagtctcctaactgatctccctgacttcacccttcagccctgtttcacatgcattgttgacaatgccacttaacacaaagctgggtgtgtcatttccatgcctgagacttttcatggactctctattgtctattgcatacaatccaagctccttaactagccataggggccctcaatgacattgctcacacgtgtctgtggacacatggagatgatcttcaagaacagttctcccttcaaagacagacttgctgcccagctgtgaggagtgtggtcggcagacagccttcagctgtcacctcctttagggtttaccgtagctgcagagagcctccttccccaaggcagtcccttttcctggatagcccacacctggtgattgaggcaggggtataaagactgtccattttaacctgatatgggacagctccgatggccaacagtcattccaaatctccctgctgggttggtgctacggtgtgaaagtgtcctttccaaaagtcatgcgttgaaactttatagccagtgcgatagtattatgaggtggggcctttaagaggtgattaggccacgaggctcctcccacgtgaatgggataagaccctttataaaagaggcttcatgcagtgtgtggctttcttgctctttcacctttccccatgtgaaggtgcggtgttcttgtcccccaaggggatgcagagaccaggtcctcactagctggcagcttggtttggatttcccagcctccagaactgtgagaaattattttctgttttttataaattgcacagtttcaggtattttgttatagaagcagaaaatgtgctgagataatcggctttctgggaggtcagcctgcaatttgacttcctcctctgcccaatcaatctccttcccttgttccttcacaggtgttgttccctagtaaacacttttcactccaaactctttctcatacttgcttctggagcccctggcctgtgacactgcctggatagcgtcactgccgccgctcttatttataacagactccccatcactccccgcacacaccctgtttcaaatccctgtgctttcatgtgtgctattccctttgcctcaacttttcttctcaattttttttctttggtcaacaaaatttctgtttttcctgtcccttcaaacccagctcagggaatatctcctacctggctccttgttgctgggcttggcttgcttctttgttctctccctcctccctttgcttagagagtactgctgtagttggtgggtacagtattgtatacagaagtgtatttggtacccagaagtgtatttggtacccagaagtgatggattccagagcagaaagggacccaggactacctgacatggtagttgtgattctggagcaggagctgtgatgaacacgggagagcagatatgccttcaacatactgacttcatttcctttgggtacatatctagaattgggattactgaaacatggtagcttcattttaaaaaagtaatttttttagaggcaaggtctcactcttccgcccaggctggagtgcagtcgcacagtcatagctcactgcagccttgccctcctgggctcaagagatcctcttgccttaacctccccaggagctaggactacaggtttgtgccaccatgcccagctagctttttaaattttgtgtttgtagagatggggtatcaccatgttgcccaggctggtgtcaaactcctggctgtaagtgatcctcgtgcctcatcctcctaaagtgttgggattacaggcacgagcaactgtgcccagcagtggttcgatttttagtttttaaagaacctccataccatcatccataattgttatactaatttacattcccaccaacaatgcttaaaagttaccttttctccacatcctccgatactcgtcattcatctttatggtgaaggctgttctaacaagcatgaaatgatacctcatggtgattttgatgtacatttttctaatgattagtgatgtgagcatattttcatgtacctattggccatttgtatgtcatctaaagaaacatcagttcatatatctataaagaacatcattgctattttgatatggatttttttgcctttgtagattgctttgagtaacatggacattttagtaatggtaattctttcaatccatgaacagggaatattttctcatttactattctcttttcaattttttcttcaatgttttatagtttttattttagagatctttcatctctttggttaaatgtactccaagggatctttggttttggtagctattgtaaatggtatggtttctccatttttttttcagatagttcactattcatgtatagatgtttctgtttttatgccagtaccatagtattttgattaaaattgttttataatatgttaatatgttttgaaatcagagagtgtgatgccttcagctttgttcttttggctgaagtttatttttggctattggggtcttttgtggttttatatggaatggtttgtttttgtttattaaaaattttattttaaaaaattttcaatattgagggtacatatgcaggtttgttgcatgtgtatattgcacccagccagagagcatagtaccaaataggtagtttttcaacccatgcctccctcccctcctccctcaccattagtctgcagtttctgttgttctcctgtttgtgtccatgtgtcttcaatgtttagctcccacttataagtgaaaacatgtggtatttggttttctgttcctgagttagtttgcttaggattttggccttcagctccatccatgttgttggaaaggatgtgacttccttcttttttatgactgcataatattccatggtatatataagcattttctttatccagtcaacgactgatgggcaccaaagttgaatccgtgtctttgctgttgtgaatctcattgtgatggacatatgcatatatatgtccttatggtagaatgatttatatacccggtaatggaaatgctgagtcaaatggtagttctgttgtaagttctttgagaaatctccaaactgctcttcacagttgctgaactaatttacattcccaccatcagcatataagcgttccctcccttttctccacagccttgccagcatctgctttttttggactttttattaatagccattctgactggtgtgagatggtgtctcactgtggttttgatttgcatttctctgatgattagtgatgagcattttttttcatatgtttgttgtccaatcctgtcccttcccttgagaagtgtcttttcctttgcccattttttaaatgtggttattttttgcttgtttatttaagttccttacaaatactggatattagacctttgtcagatgcacagtttgcaaatattttctcccgttctgcaggttgtctgtttactcttttgatagtttcttttgctgtgtagatgatctttaggtaattaggtcccacttttcaatagtttgacctattcttttcttatttggaggccttttatttctcttgcctgatcgctgtggctaggccttccagtactatgttgaatagggtggtgacagtgggcatccttgttttgttccaggtctcaaggggaatggctccagcttttgtccattcagtatgatgttggctgtgggtttgtcatagatggctcttattattttgaggtatgttccttggatgcctactctgttgaggagttttatcatgaagggatgctggattttaccaaaacctgtttctgtttctattgagatgatcatatggtttttgcttttaattctgtttatgtgataaatcacattgattgatttgtgtatgttgaaccagccttgcatcccaggaagtaaagttgggcaagtccagatggtcattttacaggtaattgctgacatgcagttgcctctcaacctggggaagactaatgaaagcaactgggttgtgtgggaaaggtggctcaggatttgagcctgaaaggcctatggacaatgtttcctacagcacgatgttgtcgactagtttcttctggtgtggcacctctattggccagaatacagagcaattcccaagatctgtgtgctggctactttaagtcctaccttcattctttgtttctaactgaccccaggtggtctcactctgcctgcgctctctctgtgtcccctgggatgagacaagcatgagcttgcctcctcctgcaaaggatcccagaatgaaggggaaactgagtatccgcttccaattcacttttcttattgtagaaactgtgggtctagaacattctctgtgtggtgtggtgctgactttggggcgggtgaaatggtcagggaacaatttctgttactctttgatgatggctcttctcagttgtgtggcccagggtggtgtctcagcctcagtcccaattcctggaatgttcaagatgtttttctaaaaatttgaagttccaggatacatgtgcaggatgtgcagatttgttatgtaggtaaacatgtgccatggtgttttgctgcacctgtcaacccatcactgaggtactaagccctgcatgcattagctctttatcccgattctctccctccaccgcccccactcccccaacaggacccagtgtgtgtcattcctctcccggtgtccttgtgttaggatggtattcttgattgtgggtgcttctagttggatttctgtgtgggggagtgaaagtggagaactcctattctgccatcttgcttatgtcgttctcttcttgaccaatttttaataaaaaatatatgattcagattttctatgtgtttagaggggaaagaagtattgttatggactgaatgtttgtgtccctgccaaatccgtatgtcgaagctctactgccccatgtgatagtacctttgggaggtaactgggtttagaggagctcatgatggtgagccccataatgggattagtgctcttataagaagaggaggagaccagtgcttttcctttctctcgttgcatacacaaagaagaggtcatgtgagcacacagcaagatggtggctgcctacaagctaggaagaagtcttaccagaacacaaccatgctggcatcctgatagtgactcctagcttccacaagtatgagaaaatcaatctgttgtttaagccacccagtgtatggtatttgttataacatccctaattgactaagacaaatgtgttttccacatctaatcattcatccagtttcaaacccaatggcaaaccaaagcttcagatcctttaaaaactaaaaaagtaactatgaataatttctttttttctttttcttttttttttgcttggtaaatcaactatttttattttattattttattttccataagtcgttggggtacaggtgtatttggttacatgagtaagttctttagtggagatttatgagatccttgtgcacccatcatccaagcagtatacactgcatcatatttgttgtcttttattcctcgcccccctcccagtcttctccccaagtctccaaaatccattatatcatttttatggctttgtgtcctcatagcttagctcccacatatcattgagaacacatgatctttggttttccattcttgagttacttcacttagaataatagtctccagtctcatccaggtcattgcaaatgctattaattcattcctttttatggctgagtagtattccattgtatatatgccatagtttctttacccattcgttgatcaatgggcatttgggttggttccacgattttgcatttgtgaattgtgttgctataaacatgagtgtgcaagtacatttttcaaataatgacttcttttcctctggatagatacccagtagtggattgctggatcaaatggtagttctatttttagttctttaaggaaactccacactgttttccatggtggctgtactagcttacaatcccaccagcagtgtagaagtgttccctgttcactgcatccatgccaacatctcctgtttttctattttttgattatggacattcttgcaggagtatgataattttttgattatggctgctttttgcaggagtacagtggtatcacattgtggttttgatttgcatctccctgatcattagtgaagttgagcattttttcaaatgtttgctgacaattagtttatcttcttctgagaattgtctattcatgtccttagcccactttttgatgggattgtttgttttattcttattgatttgtttgagtttgttgtaaattctggatattagtcctttgtcagatgtatacattatgaagagtaaatcaactattgaccctgatttaggcagtgtggtttatattctgaaaatgactcacagattttgaaaaaattacataaaaatcttataattttctttccatcacactttctcagcatttttgccataacattttcttaaactaaatgaatttgaataactgccctgtgatttacttaggaaaattgcttatgtatctgtttcctcatttgtaaaataaaaataacaaaaccttgttcataagattgtttaaaggactcaatgagaaacatttgaaagtcctgtaatctggcagatgtcagaaatatgatttccttcctttcttgacaccagtgagcataatagaaaagtaatagaaataatgcttcagctaattttggttagaaataaccatgacttttgtctctacagatccatgaatagatgagttttaaagtctgattcattctttaaagtctttattaattcaatggcgtaataaaaacctcacagatataagctatctttttatatctcatattttgacaccgtatcaaacccttttccaggtaccatttaactcactcaattgagaaagattgcatgcctagatggctgaagacttttattcctttcacatacagttaaaattgggagtaagtgcttcgcaatagtgtagatgatgtagtgtaaggtagaatagcacttaaccatggcataaattcaattatacttgtgtcttataaggtataattaggcaaaaattagattctaattttagtttatataattactgtggtaaaagatgtattataatttttaagtactgagttttttttctgggtttttgcattctgattctctgttacagttttttcttcccatagtggtcttctgtcctatcctccctttataaatttgcaatatacatttttaaatataatttctgcatagttccattttctatgaaagagcaaacagttcagctaggaaatgggaacaatatcagcctttagatagtgtgggcgaaacagagtcacttccctttcagctcagctttgatttcaagttacttaaactctacctgaaaatgattttatgtcatatacttgtacaatgtaaacatcatccaaattaaaaacgttaaagcctcaatgtcttccctaagtatttatgaaaataaaacaagagactatttctgattctattatcaatattgagaaggaatggtcagtaagtatatgacattttatagtctttgatcacgaaaagaggaaggtaatttgaaagtgtgttctatttgtaaccttatctgctggaatttatgtgttatctgttggcattgccagcacatataaggctatatgttttaaataactaatttgttaaagaaccattaaaaatatgagtttgaaaataacaaaggaatttaatactacttaataaatattttagggttaaaaataagtgttacattttctttagcggcatatttcaagcatataataaaataaaataattttagacacatatataccatccacaaaattaaaaatattaatttgttacctgatcatgtcacttctttctgtaaaaaagatttaaaatattatagttaacactaaagcattatccctattcctttccctcattttgttctccttttcaaaggaattgatttccgaatttgagaacaattttcaagtatgtttgtactttaggagaacagttctcaaacttttggtttcaggatgcatttacctgcttaaaatttttgggaccaaaagagccatgagctgtgtttatatgggttttatctactgatattctcatattagaaagacatttaaaatatttatttactaattccctcataaaacaataatattaccatgacatgtttttatagtaggattttaaatagaaataactatattttttaaaaaaatttattgaagaatagcatggttttactttttttccaatctttttaatgtctggcttaacacaagggagctagattcctgtatcagcttctgcatttatttgtagtgatatgttattttggttgacatgtatgaagaaaatccagccttatacagatgtgtaattgcaaaagggaggattatgttaataaccttttcaattaatattatttgatactacatcaaaacgtgataagtggtagtttcttaaaggttagtagcaatgcagaatctgataacacatgaatagacattttatcccctatgtcattaaaatccattggcttcttttgcattttaagttaatcttttatttatgtgtaactttttcacataatgcattggtcatttgaaaaatactggctcactgagttatacagatcttccagtgttgacacatttcatatatatatgaaatatatatccatcaccatgatggacgaattttccaaaggggtgatattgcttgatagaccaaatatttattactggcaacaaatactgtcagtttttcttacagcgacaggctcacttcatttattttgtggcaacgcctgccaaataccaattctgaataactatagtttatcagtaattctaacaaataaaaataatgttccatgaaatggctggttgagcccaaattcaatcattcaagtacttcctcacaagacaatcattgtactctgagatgcagaagtgctctctggtactagccattatattatacaaaatattaaaaagacatacatgaaaagatgtgatttaataaaaatttattgctttatcaaggacaacatttgtttagaattttgtctttctctgcatctattgacatgttgattttttctttttatttgtcaatataataaacacttatggattaaaaagtatcaaattatctttatatacctttgaaatatcctaatgggtacttatgcagtattattatttttaaattctctgttggattcaatttactagtattttctttgggatacctgtatttatatttttaagtgaaattagctcttgcactttttcttgtcctctttttctgctttgatatcaggtgataattatgacataaaactatttgggaagttttatttctttttctattctctgcaaatttttttttaaaaaaactggatgattcgtaacttcctaaaagttgcttatcaatggatttatatttgtgatgtgtacatattcatatatatatgaatatttaaaatgattgcttaaattctagttataggactatttaatttttccatttcttcttgagtcagctttgaaaagtcacatttttttcaaggatttatttattttgtcaaaatgttcaaaattattggcatgtagatgttgatgatattccctcttcatcaccctaatcttgatgttatctttagtttttaccaccattcttcccactgtagtctttactcatgtcttttctttctttgctcaatgttccaggggtttgttcattttattttaaaagaacctatctttggcttttaaaatcctcttcattgtatttttgttttatattttattgagttcgattcccaatttatttattaaaatatctcctttcctctatgttctctgggatcactaaattgttcatttgttccagaatcctccccttctactggccatactaccactgctatttatgaatatgcatttatgtttgagagttttgttttcagggatggatggaattcttgcataaagagaaggaaggtgaggaactacagaaataaaagataggatggtctttccaagggcaaggtctgacttcctacagagaaaaggaatgcagggaaaaggcaagagagtgttgctttgaggccccaaagataaaatcaacccagagcacaagaggaatcttgttggcatttctgcatgaaccatatgagctgtgtccagagtgactatatgtcaacattgaagtggtgcgtgttgtacctgttagaacatcaagaaaggggaagcctcacccagggcatctgtggtaggggtagtgcaaagtgtcttctctaaagagcttgaagatagcaggctccttagagaagccaaacctctgggtcataagtgaatgggtgctagaaaacatgagagccctccctaagctatgactgtgtatatatagataagcctaggactgtgggcctatgatcaagcaggtttaaatatttgaccctgtaaaatcctggtagtagtgttagcatgacattatttattgccaaggctggtgaggtctgggaggcactgggatacacattgtgtcttttcttcaccacaggtagatatgctcatcctgagctggagctgtactctgactgttgcatatcccaaagcataatgccttatgtgtggagaaggatatttccggtctccacttcaatcccctttccaaaattaccttcatttaggcctctgaaagggtctccataggactcttcccggagccccatgcatgtctttgttcctcagcctgtagatgaaagggttcatcataggtgtcagcacagcatacatcactgtggctactgagtccttcatggagtaggtatggaggggctgcaggtacaccatagcaagcgtcccataaaagagggagaccacacccaaatgggaggcacaggtagagaaggttttgtatttcttagaggccgagggcatttgaaggatggttctgacaatacgtacataggatgtggtcatgaaccctaagggggtgaggaagatgaagcagccagtggcaatcaacgctgtgtgaatgatgtgggtgttggaacatgccagccacagcaggatgtacatgtcacagaagaggtagtggatctctcgaggcccacagaaggtcaccctggtcaggaggaaggtgaggaggaggccatagagaacagacagcccccaacacaaggagaggagcaagacacagagcccagggctcatggctgtgacatagtggagggggcagcaggtggccacatagcgatcatacgccatcacggccaggatgaggttgtccagggtcaccaaggagaccaggaagtagagctgtgtcagacaccctgcataggagatggctttgttctgggactggaagttcaccagcatcttggggattgtgttggtgacaaagaagaggtcagtgaaggagaggttggccaggaagaagtacatgggggtgtgcaggtgggaatcagagctgatggccaggatgatgagcacatttcccagcaccgtgaccaggtacatggacaggaacatccaaaacaggatccgctgctgctcaggactctctgagatccccaggagaaggaactgtgagttctcactctggttatctccatccattcccccaactttctgtaacattaacaccaacaaatgtttattaagtgccctcatttgaataaggacacgaagataagcaaaatcaactcttttcttagaattaaaatatcttggactaaactttaaaaataacaaaagcaacaggtcattataggcacaaaaatagaatatggaaagtatgcaacttatttattccagcaacttctcacctgacataatgaatattataaaaacaatgtctaagccttatttttaatcctgccatcttccaatagtcttgaagtgtttaaagtttagtgtgttatgttatgattttatacagggttttaagtggtatttaatacaggtatatgcattacaagaaaagattattgtccaattggaggaagtggagaaataaaatattggaaaggagaaagaagaattattattacttgttgatataatgatctctctgggaaatctaagaaaatgaatggaaacatcattagaaaaaaaagatgtctgtgattagtcagtgaagtgacccatgacaaaatgaacaggctctcagctttcatggtccccgtaagccacgtagtgcagtgctaaagaccgttctgtgggaactcttttttttttttttttttaattttaattttagattcgggggtgcatgtgcagatttgttacaaggatatattgagagatgctgatgtttgggcatctattgatcccgaactcttaaattcaagtcaaagcactgcctcttcttggctgtaatgcctcaggcaggtcacttgtgttctttaagactcaggttttttaaatgtgaaaaatgggttggggtgaggagaaaattaaggaataaagtacttaacacaaagagctgacatgtggagagcactcaataaatagtacctgttattatatatgaatgataagaatactaagattaaaatatgaaacacattatcagcaaacaatctatgcattaaggtattaataagaatctctattgaggcataaagtaaaaatttattaaatggacagatataaccaagattctagataaaaaagatgagatgttgcaaaggtgcatattctgagttgttctaaaatttaacctatttgaaagtcaaaattgtaacagggttttaaagaaacaagagctagtttaaatttcctataaaataggaatgaaaataagctaggaaaatgttgaagacaaggagacacttgctctattaagaactttaaaatagtgggggtactggtgctagaatgaacagatcagtagaactgtctagaaacttaagaaacagccaagttcatgtggaatgtgacactttaattcaccagggaaaggttgcattatgcaataaatgacattaggacaactgtctacttattttttgggaaaagttacatcaatgttttgtattttatcaaacatactaaaacataccaaacatactagtatattttatcaaaatatactaaagattaaaaaattattttttccttttgaaaaactgaatgtatatggaataaaacattaaaaatctgaaaagttataaaggagataataaaaattgtatcaaattccagcatgtagagttagataaccatggctaatgtctttttagccgagacatgaaggaccacaaaaagccagtcttgtaacacaataggcaaagagctttgcagaaaaacagccaccctgagcagagcccctgagcagggaaaggtcattcttgtgtttaaggaagtaaatataggccagcatgtctgggagcaaagaggatattggtgagacaggatgttgtgcaatggccagtaatgaactataaagcagaagtggctgtgcatatttagcaactattgtttttcttcatagtttatcaacagtatttaaaaaatcaggtatggctgttgcatttttaataaaacactttttcagtgtcactcaagatacattatgtgaatagccttcttaatatggaagcatacttgtatgcccattatgaaccactgaatcaatttgctaatattttatttagacttttgtagtcacaattattcgtgaagtttgtctacggtcttttttggcatctgcctttttagtacaatttggcttgcatcagagtccatactaaacttgtattcacttattgtcaagtctaacatttaaaatttcctgcaatttctttaatggcttacaagagaaattttaaaaatattttgtcgaattctttttgtatacatttatttatttagagattgggtctcactctgttgcccagcctggagtacagcagtgtcatcacagctcactgtagccttgaactcctgagctcaagccatcctcccacctcagcctcccgagtagctaagaccacaggcgtgtgtcaccatggctggctgatttaaattttttctgtagaaacagggtctcgctatgttgtccaggctggtctccaactcctggcctccagcaatccttctgccttgtcttcccaaagtggtttgattatagtcatgagccactgagcctggccttggaattctttttctaaataaaaatagcttcagcagggtgcagtgactcatgcctgtaatcccagcactttgggagtcagaggtatgcatatcatttgggcccaggagttccagacccagcctgggcaacatggcaaaaccccatctctactaaaaatacaaaattaactgggtgtggctgcagatgcctgtagtcccagctacttgggaggctgaggtggtaggatcacctgagcctgggaggccgaggctgcagtgagccacgattgtgccactgccctccagcctgggcaacagagcaagaccctgtctcaaaaaaaatggctctaaaaaactatattgtaatctattgattatagacaaaaaatttccaacgtgaacaattaaagcaataccaaaaaatttatacaataagtaaaagtcgccccaaattctgtcagagcagccactgtttacactttggtgaagatactttccgtttgattcattcagtcatctttattcactcagcaatgtgatggggaacttcctccaagtcaatattgtcattagctatttttgttgttgttgttgttcagggaccttatttttcagcctgcatgatagttgtttttttccgagatggagtctcttgctgtcacccaggccggactgcagtggcacaatctcggctcattgcaacctctgcctcccggctttaagtgattctccagcctcagcctcccgagtaggtgggactataggcgcccacgaccatgcccagctaatttttgtacttttagtggagaaggggtttcaccatgttggccaggctggtcttgaactcctgacctcaagtgctccacctgctttggcctcccgaagtgctgggattacaggcgtgagctgcatgatagtttttaaatcttaatatttaaaaaaaaacaacccagctacaggcgtaccttggagatattgtgagtttgattccagatcacctcaatagagcaaatattgcaataaagcgcatcacacagtgttgtggcttcccagtgtatacgtgttacgttgacactatactgtaggctattaagtgtgcaggagcattatgtctaaaaatgtacattccttaattaaaaataccttattgctgagaaatgatagcaatcacctgacccttcagcaagttataatccttttgctggtggaagatctcaccttgatgctgacggctgctgacttaccagtgtggtggttgctgaagtttggggtggctttggcaatttcttcaaacaagaacgataaagttggccatatcagttgactcttccctttaggaaacatttctctgtagcatgcgatgctgcctgacaacattttacctacagtagaacttctttcaaaattggaggccatcctctcaaactctgccactgccttatcaaataagttcatgtctatgctgtattctttgttgtcatttcaaccatgttcacagcatcttcaccaggagtggtgttcatctcgagaaactgctttctttgctcatccgtaagaagcaactactcatcggtccaagttttattacgagattgtagctcttcagtcacatcttcaggctccacttctaattctgttctctgctctttccatcacacctgcagttacagaactcttcctcccagcgaagtctcgaactcctcaaattcatccatgagcattggaatcaacttttcccaactcctattaatgttgatattttgacctcctcccatgaatcatgaatttcttaatggcatctacaatggtgaatcctttccaagctttcccttactttgcccagatccatcagaggaatcactatctatggcatctgtagccttacaaaatgtgtttcttatataatcataagtcttgaaagtaaaaattactccttgatccctgggctgcagaatggatattgtgctagagacatgaaaacagcatcaaccttcttgcacattgtcatcagagtgcttgggtgaccatgaacataatactttgaaaggaatattattttctgagtagtagatctcaacagtggcttaagatactcagtaaaccatgttataaacagatgtgctgtcattcaggctttgttgttgcatttatagagcacaagcagaatagatttagcctaattcttaagggccctaagagttttgaaatggttagtgagtactggcttcaacttagtcaccagctgtattcgctcataacaagagaatcagcctgtctttgaaactttgaagccaggcattgacttctcttctctagctatgaaagtcctagatgacatctttttccaggagaaagcagatttgtttacattgaaaatctgttgtttaatgtactcaccatcgtcagttatctcatctagatcttctggataactcgttgcagcttctacatcatcactttctgcttcaccttgcacttttatgttatggagagggctgctttcctttaaccttaggagccaactttttctagcttcacattttcttctgcagctttcttagttgtctcagcctctgcagaactgaagagaattaggaacttgctctgtattagaccttggcctaagggaatgttattgcgggtttgagcttctatccagaccactaaaactttctccatatcagctagaagtctgtttcactctcttgtcatttgtgtgtgcagtggagtagcactttttaatttccttcaagaacttttcctttgcattgacaatttggctaactgttttgtacaagaggtctagctgttggcctatctctgctttcgattgtctttttcaaccagcttaatcatttctggcttttgatttaaagtgagaggcatgtgactctcctttcacttgtacacctagaggcctttgtagggttactaactggcctaatttcaatattgatatgtctgagaataaggaggtctgaggaaagggagagagacggaggaatggctgatcagagatggaggaatcgctgatcagcagtcagaacacacaagacatttactgattccgtcctacttcttatgtgggtgtggtccatggcacccccaaataatggcaatggttacgtcaaagatcactggccacagatgagcataacagatgtaatcatgatgacaaagtttgaaatgttgtgagaattaccaaaatgttacacagaggtgtcaaatggagtatccctaacagatatctatagaaaactgcacctcaaaatagaacaagattcttttcagccatccttggaatattcccccagacagaccatatgcaagggcataaaacaaacctcaatgatattcaacatggaaataacacaaagtgtgtacttcaattacaaaggaatgaaatttgcgatggaaagaagaaaaaatggagaaaactcacatatttttggtaatcaaacaccatcctccaaaataaccaatgaatcaaagaagcaacagaaacaaaagataaatgaaagtgaagatacaactttccaaaacttaagggactcggggagtgtaggaaaaatggtggataggaggcaggactaacttgcagttcccacttggacggacagagcagcctttggagactcccatcgtgagcttttgctccaagaacaaccacaggaacataccaggaaagccgaggtagagtgctcacctctgcctgagcatgaagcatgcttctggacaaatttatcgtgtattttccctactgtagctgaggctccccatttcccccacaatagctcaagtttatggccaggcggtcaaggcccaggatgcttcagccccagtggactctcctgcttgcctgccctccactctgtactctagcagtgcctttgcagtttgtatggttctagaatacacaaaatattttgtctctgtccttcatactgattgttccttttcaccaaatatgctttcttcattctgcttttccagactgaatttttttccttcaattgtcagcctggtaagacctgctctagcacctgcttaagcgtctcctcctcctgacatctcccaccccagagtaaccactccagtttctgcactgtttttggcctttgtattctttttcggattgaccctttgcacattttgcttaactatccattctctgcaagactgagagagtctcaagggtagggacattactctgaattcctgcatcctcaggatcttgcacaatgccaggcataatgtagagatcagtaaaacaaggttgaactaaactgtatagaatagtagacatttcatgcatttgacataaatgaatggacaagagtcatgagacctggcgcctatgtatcgatgaaaatgtggttgcttagggaactagctgatgccagggcaatgtggagcgcgttctgcaaattcagtcttgaacaggataaatttgaagtagcagctgggtaagaaaatgttgatgtggggactgtgagcaatgtagaaggttaaagtaagttggagctacaagctttagtggaggtaggatggggcaggcaagcatttagcaaatgaatgtgtttttttaattttaatttaatttaattttatttttttgacagagtcttgctctgtcacccaggctgtagtgcagtggcgtgatctcggctcactgcaacctctgcctcccagattcaaacaattctcctgcctcagcctgctgactagctgggactacaggcgcccactaccatgtccagctaatttttgtatttttagtagagacagggtttcaacatgttggtcaggttggtctcgaactccagacctcacgtgatcctcccacctcagcctcccacagtgctgggattacaggtgtcagccactgtgcccagccatgaatggacttttaaatctcaatttacagatttgatttccctgatatctagggtcagtggtatactgaaaggaaagtttgaggcagaagtgtggattcaaatcctagattaacgcatacaacgtttccccccactccacccacccccggcaaataactcctcatttctgagcacttggacagagaatgtgcttacgtgccttatctatattaaggtcttttatttatcgcacacacggaactatttggctctatgagagatgattccaccaagaattagaagagcaataatctttttacagttactcagcttgtaaaagaatggggtcagtatttaaccctctttactgactcaaagctgatgccccaactactcgaccgcgtgttaaaggacagcaataatgtctactttatgcaacgttaagagctgaaatcctgaatgtggaaggagttctctagcttgaaagctgattttaaatgggaggtgctgttatggggatggcaaagggagtcctgtttaaccgtttcctccagcttctgtctcccagcccactccagcaggaaactgttctccatcctggacctggttctgccccctactcaggcaccctgggatccctcagtccaccctggggtctgcagggagtggtccaggatgtcagggttgggacgtaatcgtgtccagacacttggtgcggctacatgggagacagatgggggacatgttatgatgggcttcccatacaaagggataagcactgcctcgatcagaaaccagggggcaaagagagagagagaaataggagccaggctgtcacccagaagacttaagtactgggccagcgaagggcactgggaaggaggtgaactccccgtcacagaagggactagaacaggctgcacgatgccatgggctgagcgatcgtttcagagccaattggagcatttagtggaagttaagtgctggttaaggccttttttagcaataaggttccaaattacacattcatgatggagtggtcctctggcatttcagtgaaagtgggagtaaccctgagcacatgctccggagactctttgtatctacagcttcccacatctcttatctgttagttgtcttatggctctaagcacaaacgagcccgtttatttcccacactccagaacttaacgtgcaccttgatccgaagagatctgcgcaaagtcagagcgatttgacggcagagatgagcccatgaccaaagctctgcttgcctcttagaaaagcggttacaatgaaaaagagggagctgatgggctcatccctgagatcaccccaaggcccctacgtgacctgagcatgaaaagcagcaccgtggtgattccctgcagggccccaatcctgagcacactcgcccaccacctctgtttctgccatggagagaaacggcttccaccttcttagaccccagaagaaactacttccttcccgccttctgggtgggacatcttcctaacaggagagaaggtaggagggaggtgatgggacttcagaaaaccaaggctgcccagaggactggacacctctgctcgcccgccctaaaggtatcatctcccacgctgcagtgagcactaggatcacctgcgatgctccaagacaaaaagctgattttcccgccccttctcggaggtgctggttctgttctgaggaccaagttctttttagtgagccccgagtgattctgatcctatgctttgggaaacactgctgtcagcccagaagagtcagcgggttctgaacgctcgtgcggtgtgaaggccgtagagacacaaactcctacgtagcgcggcctgggggagaggacagcgagtgtgcgtgtgttacagaaaagtgctgcaagcttgctgttgggacactggcctttgtgccgcctctgttgctccccagctgtaggactttgagttgggcagtcagtcccccagagccaccatgtgggcattcttgtaggttgtgagaatcacaggcagcagggcgggtgccagtgagcccgtgaaaactgcagagtgccaaaaggattggaggaattgttatcttaccttaaacccttagcagttagattatgaagatgtgagtatgtttgctttttgcatcctttaaaagaaatctttgctaaatctttgccaatgtccttttttatattttctgctaaaagatttattgttttactattcacatttagattcactatcaatttaaaactgatttttgtatcaggtgaggtataggtcaagatatattttttatcccacaaatatgagagaaaatggaggagaagataagagggaagagggagaaggagcatgagcctgaggcggacgcaccttacccactgctctgtgctgctctcagagttcactggttcggctgcctccacgttcctgctctacaggatgaaaattcagtaaggacataagagactacaatgcattatttcctgaatagaacttgctgacttgtcctatttgctaaatgtaaagagcagagaacttgttacctgcatcttcagtccctgcaaaagaggagacagaatttgaggctctttatgccctgatgagcctggggggatttgagaactgatgttgggatcccagattcacgatggaaaggactaaacagggactgtatcagaccttatcagttttggagcggccctggagatacaatcccaaggtagcctcttgaaatgaacatggataattgctccaatgttattatctagaggcaagaaccttgagaaatgtgtccagtttatgagaagtaaaccagctccttactgcgcagcaatcctaaaacacacgctggtagtcggccagagataaagcagccctcatacatattgcagcctggctttgacttaccagaagtgtggaaaatctgaagtactaaacttcgattaggatgatctagacttctagtgaccccaagttctaagcaaaagcaattgaaaaaaaatcctatttggaggaacagtgcccccttagagctcaaattacttctcttaatactttctcaagcacagtatccaacatacatccgaagataagacacacaaggatgaaggattccaatagcaagaaccagcagatgggaggcatatagggactccagataatataattattagacacagattaaaacagtcatgcttatggtgtcttagaaaataaaatgaaacctgaaaatttcgtcagtgacttttacaaatggaacagtcataatgagtaaccagcactcagatgaaaacacattactggccctccagaagtcacctcattttcctctgtagtccctgttcctacgcgggtaatcagtatcttgactcctaatagcataaattagctttattcatttttgtactttatattaaatcatacagtttgttctcttttgtatctgcttctttcactcaaccttatatatgtgtgattcagccacactgttgtatgtggttgtatattattgctcatatttattgctgtttaacattgtattgtgtgaatgtaccatttaataaatgcatttaaccattgatagacattagtagccagttgggcttgttctgaaaagggcagatgcacgtttctgatggaaatatatacctggctttgaatttctgtaacctagggcagacttttgtgtagtcaacagggctaaacagttttccaaacacgtgtctccattttaatttccccgcgcagtgtatgggggttctggttgctccaaattttaacataaggtggtatctgaagatattttgatgtgtgtgtagtggttttgtttatggttataatttgtattttcatgttgagtaatgcggtcaagtactttcttatatggctgtttatctgtgtctgtctatcatctctctttgttgtctatctacctaccacatatgttcttgtgtaaagtacccattcaagtattttgcttatttttctattatgttatctttttatgttggtttgtatttccttaaatgctttgtgagtcttcgcaaatgcttggtattaggttgattgcggtttttgccattgcttttaatggcaaaaaccgcaatcacatttgccccaacctaatagactatttgtgtcaagtttgtgggttggcttttatgcaactaatggtggcttttgagaaacagaagattttaattttaacgtagtccaattcatcaattttcatttcagaattattgctttttgcatcctttaaaggtaatatttgccaatgttctttttatattttctgctaaaagatgtattgttttaccactcatgtttagatttactatcaatctaaaactgatttttatatcaggtgtggtataggtcaagatatatttttattccacaaatatgaatctccaactgatccagtgccatttattgaaaagaccatcctttccatactgcgttgctgtgtaaatggttttttcacatctttattgaggtatacttaacaaataaaaattatttaaggtttatatagtgctgttttgatatatgtaatatatatctattgtaaatgatcaccacaatcaagctaattagcatatccatcatttcacatagttactgttattttggtgtgagaatacactagatctattctctttgcaaattttgactttgtaacattgtattattgactatagactgggtatggtggatcaggcctgtattcttagcactttaggaggctgaggtgggaggattacttgaggccggcagtttgagaccagcctaggcaacatggtgagaccccatctctagagaaattaataaataattagtcaggcctggcagtgtgtgcctatagtcttagctacttgggaggctgaggtgggagaattgctttaacccaggagttgggggctacagtgaactatgatcctgccactgcactccagcttgggtgacagagcaagaccttgcctctaaaacaccaccaccaccaccaacaacaacacaatatagttaccgtgctatatattagctctccagaacttgctcataactgaaagtttgttacctttcaccaatgcttcctcaactcctccatctcctgacctctggcaaccactcttttagtctgcttttgtgagctatactttaaaaaaaaactttaatttttaatttttgtgagttcatagtaggtatgtgtatatatgaggtacatgagatgcttttatacaggcatgcagtgtatcataatcacatcatggaagatggggtatccatcccctcaaatatttatcctttgtgttacaaacaatccagttatactcttttagttattttacaatgtataattacattattattgactatagtcaccctgtcctgggccttattcattctgatgattttttgtacccattagccatctccccccaccactatccttcccagcctctggtaaggatccttctactctctaactctgagctatacgtcttcagattccacatataggtgagatcctgcagtttttgtctttctttgtgtggcttattttgcttagtgtaatgttctccaggttcatccatatcacaaatagaggatttacttctttttatgactgagtaatatattttgtgtgtgtgtgtgtgtgtataaggtctatatgtctctgatttttatacattgattttatatcctgcaactttactgaatttgttaattcattctactagtttattttgtggtgtcttttatgggtttctacataaaagattataaataattttattttgttctgatttggatttttttttgtcttctttttttattattatactttaagtcctgggatacaagtgcagaacgggcacatttgttacataggtatacatgtgccatggtggtttgctgcacccatcaacccgtcatctacattaggtatttcttctaatgctatccctttcctagcccccaaccccctgacaggccccggtgtgtgatgttcccctccctgtgtccacgtgttctcattgttcagctcccacttatgagtgagaacatgcgttgtttggctttccgttcctgtgttagttgatgtctttttgtttgtttgtttcctaattgatctgtctaggacttccagtattatgttgaatagaagtgccaacatagcatccttgctttcttccaaatcttagaagaaaagctttcagttattcttcattgagtatgatgctcactgtgggcttttcacatatggcctttattgtgttgaggtaaatgacttctatacttaattagttgagactcttcatcatgaaatggttttgaattttgtcaaatgccttctctgcatttatggatataatcatgtagtttttatccttcattctgttagtgtggtatgttatactgactgatttgtgtatgtcaaatcaaccttgcatccagggataaatcctacttggctatgtattgtgctgttgaatttggtttgtttatattttactgagtattttgaatctatgttcataagagatactggtctgtgttttcctttcttgtggtgtctttgtctggcttgggtatcagagtgatgctggtgtcattaaatgagtttggaagtgtttcctactattatttttggaagaatttaaaaagtttgggtattaattcttctttagatatttggtagaaattacctgcgaagccatccattcatgtttcttttattgctggaaagtttgttttttaaattactgattcaatcttcttatttgttattggactgtttaggctttctacttcttcaggttgaaaggttgtgtgtttctagaaatttatcagtttcttacaggctgtccaattaattggcttgcaattgtttataataatcctttctgaccttttttaatttccatggccatagattatagaaatttcaccccttctgattttgtttgagtatttcttattttaaaaatgattctagctaagagtttgttaattttttcacatttttccccaaaaaacgatgtctacttttgtctatttttgatattattttatgtttcatttatttctgctctattctttattattttcttccttctgctaactttgggtttaatgtcttattttttacttccttaagtgtaaagttaggttgtttatttgagatatttcttctttcataatgtaagtttctcactgtcaatttccctcttagtactgcatttgctgcaacttttaagtttttgtatgttgtgtttattttcattgttttccctgaaatattttttaatttcctttttaatttcttcgagtcaatagttgttcaggagtgtttaattttcatataatctataattttcctattgttattgaattcatttttcatttttaatagccagaaatggcacacagaatgatttcaatcttcttaagtttgttaacaattattttgtaacctagcatgtgatttttcttggaaaatgttccatgtctgttttagaagaatgtgttttctgctgctgttgggtggaatgttttgtacatgtctgactcatacattggtttatggcattgttcagatctggtgtttctttgttgattttctgttcagattataaatcctttatggaaagtgggatatcaaagtctcctactattattttattgcttttatgtatcccttaaaatctgtcaatgtttgctttatatagttaggtgctctgatgtttggtacatgtatatttataattgttatatattcctgtggaatcaaccattttgtcattatataatgaccttctttgtctcttgtaacagcttttgaattaaagtccattttatctgatgtaagtatagccaccctggacacttggtgtatttgtttgttttgacactgttgtaaagaactacctgagactgggtaaagactaggtaaggcaaagagctttgattgactcacagttctgcatggctggggtggcctcaggaaacttacaatcatggtggaaggcaaaggggaagcaaggcacatcttacatggcagcaggagagagagaaggggagggtgaagtgccacactgttaaaccatcggatctcatgagaactcactcattatcatgagagcagtatggggaaaatctgcccccataatccaatcacctcataccagttccctccgctgaaatgtggggattacaattccagataagatttgggtgggacacagagccatatcatattattccaaccctggcccctcccaaaattcatgtttttctcacatttcaaaaccagtcatgccttcccaacagtcttaactcattcaggcattcaaaattttcagtccaaagtctcatctgggacaaggcaagtcccttctgcccactaccctgtaaaataaaaaacaggttagttactttgatacttcgaagatacaatggggatataggaattgggtaaatgctcccattccaagagggagaaattgaccaaaaccaaggggctacagccctcatgcaagtccaaaacccagcagggcagccattaaatcttaaatctccaaaataatctcctttgactccatgtctcacatccagggcacactgatgcaagaggtgggctcccaaggccttgggcagctccacccctgtggctctgcagggtacatacagcccctgcaacttctttcatgggctggcattgagtgcctgtggcttttccaggcacctagtgcaagctgttggtggatctaccattttgggggctggaggatggtggccctcttctcacagctccactaggcggttctcctatggggggctccagccccactgcattgccctagtagaggttctccatgagggctctgcttttgccacagacttctgcctggaaatccaggcatttccatacatcctctggaacctaggctgagattcccaaacctcaactcttgtcttctgcatacctgcaggcccaacaccacgtggaaaccaccaatgcttgggacttgtaccctctgaagcaatggcctgagctttaccttggccccttttagccatggctggagctggagtggctgggatgcagggtgccatgtcccatggctgcattgagtcttctagtcttccatgcctgtgattgaaggggctgctgtgaaggtctctgaaatgccctggagacattttccccattgtcttgactattaacattcggctccttgttacttatgcaatttctgcagccagtttgaatttctccccagaacatgggtttttctttcctactgcatggccaggctgcaaattttccacacttttatgttctgcttctcttttaaacataagttccaatttcagataatgtctttgtgaatgcatatgactataggcttttagaaacagccaggtgacatcttgaatgctttgctgcttagaagtgtcgtccaccagataacctaaataatcactctcaagtacaaagttccacagatctttagggtggggcaaaatgcctccagtgtctttgctaaagcatagctagaatgacctttactctagttcacactaagtttctcatctccatctgagaccacctcagcctggacttcaatgtccattatcactttcaacattttgtccaaaactattcaacaaatctctaggaagttcccaactttcctacatcttcctctcttcttctgagtcttctaaactgttccaacctctgctccttacccagttccaaagttgcttctacattttcaggtatctttatagaggtaccctactccgctgataccaattttctgtattagtccattttcacattgctataaaaactacctgacactggataatgtatataaaaaaagaggtttaattgactcacatttttgcatagctggggaagcattcaggaaacttacaatcatggcagaaagtgaaagggaagcaaggtacatcttacatggcagcaggggagagagaggggcgggggacgtgccacacttctaaactatcagatctcaggagaactcactcactatcatgagaataacatgaggaaaatctgctgccatggtccaatcacctcccaccaggttcctcccctgacactaagggttacaatttgaagtgagatttgggtggagacacagagccaaaccacatcacttggttattatttgcatggaatgtatttttcttcttcccttaactttcagtttctgtgtgtccttaaatttaaagcttgtgtcttgtagaaagcacatagttggatcatgtattttaattcattcagctgctgtatatattttgaataatgagtgtgattttcttatacttgaagtaattattgaagtaattactgataggcagacacttactatggtcaatttgtgattgtgttctgccttttttgtcagtctttggttctctttctcaaagaaatacctcccttctttgtttctatctgaccacagtgagtcaatcatgccattacccccctgtgatctctgtgaggtgagactggagtgggcatcctgataggtatcttggaatgctgggaaagactgatgcccatctcttattgtattttttgtgatctgatgattttttaaaatagtgatataattttatccttttttctttatttttaagttacttttatttattaattttaagagacagggtttcactctgttgcccaggctggattgcagtggcacgatcctagcttactgtggtctccagctcctaggctgaagggatactcccacttcagcttcctgagtggctgagactacaggcacatgccaccatgccctgtcaatcttatttttttattgtacaatggctttttccttgtggtcaccatgaggtttggatagaaattcttataacaatctgtttgaagctgataacaacttatccacatagaaaaactccacacataatcttcacacttccacatatatctccttgatttcagaatttacatatttttatatttttttgtagttatttgtattcttaattattttccaaatgaatttaattttctatctgtatattcttgtagttcactgaacttctttaagaggacaattctggatttattgtgaatcctttcatggatcttcatttttgcaggatttatcgttatatctttattagttttttttcttttggaggtgtcatgattccctgattcttcataatccttgtgtcttttgttggtgtctgcacattgaggaaatagtcagctcttccagattttacaggtattcttgggatagaccttcactcttaagtctagcctgtgattttggatgggccagctggtaatgacatggaatagacagagcctgccatcaggttctctcatttgtggggccaaggcctttgctctgaggttggaatgggactactggctaggctccattttccgttagaccacaggcttggctttggaatcaggcagaacttctggctgggtgctgcaattgcttctgattgggctgaaacacagggtatgttcactggccaggcaggacctctatttgagttctgcaattgggtcaggctgcaggttggaccccaaggttagtcagaattactacttgggatgatcaggatcagctgctatgatcagagagatgtatggttgaggcttggctccctgtcagggtgaagccctggagtgggttttgaggctgatgtgaactgctatttcaatttttgggtggtctaagtttagcccattgtttactgaaaggcattgtattgggcaacaccctccctgggtggggtcttggataagctttgaggctgacttgagagctgtttgaatttctgggtggtgtaagtcaggctttgtactttgccaacagttgccgtgtttcatttctccctcgctggatggcgtcttgaggtgggctttgaggacgagctgagctggtacctttgattggatgcctctgcaggccacagcacagagcaccatcaaaatgtgagcactagttgctgtgagcaatacctccattctttgtttctatctgaccacaggcagtgagccatgtcattaccccctgtgatctctgtgaggtgagactggagtgggcatcctgagagatgtctcagaatgctagggaagctagatgtccatcttcagctcccttttcccactgtagaaactgtgggcccagggaaattctctgtttatggcactgtgccatgttgagggagggcaagggacaatgtggttgaagtgagtgcatttctcttgctcttcaaatgcagttcttatttgtttctgtgatacacacaagtatttcaggcttattctcaaggtttgggggttttcactgaggtatacttgtctgtggatagctgctagtagaactttctgttgcagggagagaaggctaggacattttattctgccattttgctgatatcattatagccattgctttttatcccctattttttatttcaataggtttttggggaacaagtggtatttggttacaaggatgttccttagtggtgatttgtgagattttggtgcatccatcacctgagcagtgtacactctacccaatgtgtagtcctcacctccttccaccctttcccctgagtccccaaagcccattgtatcatttttatgcctttatgtcctcattgcttagctcccacttatgagtgagaacataccatgtctggttttccattcctgagttacttcacttagaataatagtctccagttccatctaccttgttgtaaatgtcactatttcattcctttttatggctgagtagtattccaaggggtgtgtgtgtgtgtgtgtgtatttataaatatatatatatttggacatatggacattttctttatccactcattgactgctgggcatttggactggttgcatgttttgcaagtgcgagttgtgctgttataaacatgtgtgttcaagtatcttttttgtatatgactgcttttcctctgggtagatacgcagtagtgggattgctggatcaaatggcagacatacttttagttctttaaggaatatccacactgttttcatagtggttgtactagtttacattcccaccagcaatgtgaaaatatttcccttttaccacatccatgccaacatctattattttttgatgttttgatcaaggccattcttgcaggagtaaggtggtattatattgtggttttaatttgcatttcccttataattagtgatgttaagcattttttcatatgtttgttggccatttgtatatcctcttttgagaattttctgttcatgtccttagcccactttttgatgggattattattattatttttttcttgttgatttgtttgagttcccaaagattctggatattagtcctttgtcagatgcatagtttacaagattttctcccactctgtgggtggtcagtttactctattgattatttcttttgctgttgcagaagcttttagtttaagtcacatctgtttatccttgtttttgttgcatttggttttgggttgttggtcatgaagtctttgcctaagccaatgtctagaaggctttttccaatgttgtcttctagattttttacggtttcaggtcttgtatttaagtccttgatccttcttgagttgattttggtaagagatgagagatgaggatccagtttcattctcctgtatgtggctagccaattatcccagcatcatttgttgaatagggcttcctttttccactttatgcttttgtttgctttgtcaaagaccagttggctctaagtatttgggcatatttctgggttctctattctgttcccttggtctatgtgcctattttcttaccagtaccatactgttttggggactatggccttctagtatagattgaagtcgggtaatgtaatgcctccagatttgttctttttgcttagtcttgctttggctatgtgggctgttttttggttctatacaaattttaggatagttttttctagttgtgtgaaaaataatggtggtattttgatgggaattgcattgaatttgtagattacttttggcagtatggtcattttcacagtattgattctatccatctgtgagcatgggatgtgtttccatttgtgccttctatgatttctttcaacagtgttttggagttttccttgtagaggtctttcacttcctggattaggtgtactcctaagtattttaattttttctaggtattgtaaaaggagttgagttcttgatttctcagcttggtcactactgatgtatagtagtgctactcatttgtgtatattaattttatatcctgaaactttactgaattcatttatcagttatagaaactttttggatgagtctgcagggtttcctatgtatatgattttatcattggtgaacagcgacagtctgacttcctctttactgatttggatgacctttacttctttctcttgtctgactgctctaagacttccagtacgatgtagaatagaaatggtgacagtgagcatccttgtcttgttccacttctcaaggggaaatgctttcagcttttctctgttcagtataatattggctatgggtttgtcatgggtggcttttattaccttaagttatgtcccttctatgccaattttgctgagggttttaatcgtaacgggatgttggatgttttgtcaaatgctttttctgcatctattgagatgatcatgtgctttttatttgaaattctgcttatgtagtacatcacatttattaacttgtgtatgttaagccatccctgcatccttggtataaaagctccttgatcatggtggattatctttttgacaagccattagattgttagctagtattttgttgaggatttttgcacctatgtttatcagagatattagtctgtagttttctttttttgtgatgtcctttccttgttttggtattagagtgatactggcttcatagaatgatttagggagaattccctctttctctatcctgtgtaatagtgtcaataggattggtaccaattcaactgtgaatctgtctggtcctggactttattttgttgtcatttttttcattatcatttcaatatcgctgcttattggtctgttcagagtttctatatcttcctagtttaatctaggggggttgtacattttcaggaatttatccatctcctgtaggtttttcagcttgtgtgcatgaaggtattcatagtagccttgaataatgttttgtatttctgtggtatcagttgtaatatctcccacgtttttctaattgagcttatttgaattttctcttattttctttgttaatcttgccaatggtctatcagtttttttttaccttgtcaaagaaccagcttcttgtttcatttatgatttttatttttatttttcaatttccttcagttctcctctgatctttgttatttctctttgtctgctgggtttgggtttggtttgttcttgtttctctagttccgtgaggtgtgaccttaggttgtctatttgtgctcttttagaattcttaatgtaataatactgtgaacttttctcttagtactacttttgctgtattccagagattttgataggttgtgtccctattatcattcatttcaaagaatttttaagttttcctgttgattttgttgttgacccaacaatcattcaggagcaggttatttaatttccatgtatttggatggttttgtgggttcctttaggagttgatttccaattttattccagtgtggtctgagagagtacttgatataatttcaattttcttaaattgattgagacttgttttgtggcccatgatatggtctatctttgagaatgtttcgtgtgctgataagtagaatgcatattctgcaattgttgggtagaatgttctataaatatctgttaagttcatttgttctaggatatagtttaagtccattgtttctttgttgactttctgtcttgatgatatgtctagtgctaacagtggagtatggaatcccccactattattgtgctgttgtctatctcatttcttaggtctagtagtaaatgttttataaatttggcagctccagtgttaggtgcatatatatttaggattgtgatgttttccttttgtactagtcctgttatcattatgtagtgtccgtctttgtcttttttaactgttgtgggtttaatgtctgtttcgtctaagaatagctactcctgcttgctttggtgaccatttgtatggaatatctttttctacctctttgccttaagtttatgtgagtccttatgtgttagctgagtctcttggggatggcaggtactaggttggtgaattcttatccattctaccattctgtatcttttaagtggagtgtttaggccatttacattcaacattactattgagatatgagctactattctatttgtcatgctaattgatggcctgaagagcttgttttatttttccattttgttattgttttataggtcctgtgagattcatgcctgaaggaggttctattttggtgtatgtcaagggtttgattcaagatttagagctccttttacaagttcttgtagtgctggcttggtagtgccgaattctctcagcatttgtttgtctgaaaaagactatctctccttcatttatgaagcttagtttcatgggatacaaaattcttggctggtaattgttttgtttaaggaggctaaagataggaccctaatcccttctagcttgtagggtttctgctgagaaatctgccattaacctgataggtttttctttatacgttacctgatgcttttgcctcacagctcttaagattcttcccttcatcttgactttggataacctgatgtctatgtgcctaggtgatgatctttttgtgatgaatttcccagttgttctttcagcttcttgcatttggatgtctaaatgtctcacaaggccagggaagctttcctcaattattccctcaaatatgttttcaaaactttcagattcctcttcttccttgggaacaccagtcattcttaggtttggccattttacataatcacaatcttcttggaggctttgttcattttttaaaattctgttttctttgtctttgatgggttgggcttttgaaagccttgtctttgaactctgaagttctttctgctacttgtttgtttctattgctgggactttccagtgcattttacatctctctaaatatgtctttcatttccagaagttgtgattgttttttatttatgctatctatttcactgaagatttttgctttcatatccttcatatcctgtatcttttttagcaggaagagctgcagaccaaactcctcagacaccaagttaaagaaggaaggggtttatttggccaggagcatcggcaagactcctgtctcaagagctgagctcccccagtgagcaattcctgtcccttttaagggctcacaactctaagggggtctgcgtgagagagtcatgatcaattgagcaagcagggggtacgtgactgggggctgcatgcaccagtaatcagaacaaaacagaacaggacagggatttttacaatgcttttccatacaatgtctgtaatctatagataacataaccagttaggtcaggggtcgatctttaactaccaggcccagggcgtggtgacaggctgtctgcctttagatttcatttctgccttttagtttttacttctttctttggaggcagaaattgggcataagacaatatgaggggtggtctccacccttactttttttttttttaatttaagttgaacttcacctttctcgggcacctccttgattagcttaatactcaactttctgaattctttttctggcaattcagagatttcttcttggtttggatccattgctggtgagctagtgtgatctttcaagggtgttaaagaaccttgttttgtcatattaccagatttgtttttctggttccttctcatttgggtagactatgtcagaaggaagatctggggctcaagggctacttatcagattgtttttgtccatgggatccccccttgatatggggctctaccccatctcctggggatggggcttcctgagagccaaactgcaatgattgttatttctctgctggtctagccatccaacagagcttctgggctctgagctggtactggggggtgtctgtgaagagtcctgtgatgtgatctgtcttcagtccctcaggcatggataccagtgcctggtccagtggaggtagcagtggagtaaagtgaactctcatggtccaagtgtttatctaggagtctatggtccttggttgaagttttgtttagtgtactagttggcctccagccaagaggtggtcctttcaagagtgcaccagctgtggtagcataggggggatacaaacttgccctaaggtggcctggataagtattccagtttctcaggtggtgagtgggaccatagagctcccaagagattatgccctttgtcttcggctaccagggtgcgtagagaaagaccattaggttggggcagggttaggcatgtgtgagctccgactctccttcggtggggcttgctgtggccactgtgagggatgggggtgtggttaacaggccaatgaagttatgttcccatggggattatggctgcctctgctgtgtcatacaggttgccagggaagtggtggaaagccagcagtgataggcctcacccagctcccatgctgtccaagtggccatgtcactcccaatgtgccctacccctaacagtgctgagtttatttccgggtagctggtgagcagggctgaaaacttgttccaggctgcaagtctccctgttgagaaagcaagcagcactttcaggtttctgttttcctgcctgtggtggctgctgtgaatagccatttttagaaaaataagttttctgcctccttttctttcacttttccttctgatacttatgtaatgtgtgtatttgtttgatgggtcccatatgtcccataggctttcttcactctttttccatttgtttctcttactagtactttcaaatgacctgtttttgagtagtgaattctttcttctgtttcttcatatctgctgctgaagctcttttgagttttttaaagtttagtcattgtattatttagctccagaattactgtttcttttttgtggtttctgtttgttgaaatttacattttatttatgtattgatttcctgattttgtttagtagtttacctgtgtttttgtgtgggtcaccatgtttcttcaaatgatcacttgaattctttgtcaggcagttcatatttctccatttctttgatggtttctgaagctttattttgttcctttggctttgctaagtttccttgattccttgtgtttcctgtagcttcacatttgtgtttgcacatttgaagaagcagtcatctcttttagtctttacaggctggttttgatagggaaagtccaatttgataggaactgtttttcaccagtcagcttagccagatattctgggctggccagttggcagggtctatgggcaggcaggcctagtgcttggggatgtgggtggatgggccagcttctgggcaccatgcacaggcccactgtagggtgcaaggccccagttgttaaaatacacatactgactattaagagctcccaaccattttcttattttttttttttcttgttcttagctactcagaggggtctggccatgtgaattgcctcagtattcttggtgaggcatgacagaagtggtcctcttggttagcatcctgaaagtcaggggaagttgtacatatgttttattttcttttttacttatggaagaactcatgagatgaggggatctctctttgtgctactctgtgctggcttgggtgaggggtgattcaggtaatgtgacagagttttttctacaatgttcaatatggtgttttttctacttctgtgtactaccagggtgctataaactttcacttggattctggagctctcacaaaggtattttcatctgtggatggttgataaattagtctgtatgttggtggatgagagatacaactgtcgattccaccatcttgttgacatcactcctttcacccgttttgaaatatcttttacctgatgtcattgcagcaatatttcacttaaaatatttagtattttccaaatatgtctgtttctctttttaatttcaagctttatatattcctgtgctttcatcgtgtctctttaaatacatctatctatattttattttttaatcagtatgttgaacattactttttaattgatgagttaggtccatttatgtttaatgtaaatttatgtacttccccgagtagactgtgacctcacatttgtaacccagtttgaggcctctgtacactgtcattatgaatagaatgagttgatgaatgactgcatgaatgtcaaatgaattgaacaccacctgtcgaggtctatatcacgtgctggatcagctgatacaaatatgtatgattgcaatctctttcaaacctccacagccatgtgactaactttcttatcagctactatttactttctgtactttggatgtgtgctagatgagagacacttctaggtttaaactggatatagtcagataaggccaagaatgtggccctgtagtcaagtacattgaagaatttgaccctgcaacattctagtgttggtgttagtgtgaccttatttacggccaaggctgatgagacctgggggacaccaggttacaaatatgtcttttttatcaccacatatctatatgctgtctctgagctggagccatgtcccaatcactgctgtataacacacaggacaatcccttacatagggtgaaggatattcctagtctccactttaatgctgtctttccaaattgccctcatgtcagcctcttaaagtgtttatctaggagtcttcccagagccccatgcatgtccttgttcctcaggctgtagatgaagggattcatcatgggtgtcaccacagcatacatcactgtggctactgagtccttcacagagtaggtatggaggggctttaggtataccatacaaagtgtcccatagaagagggagactgcacccaaatgggaggcacaggtggagaaggctttgtatttcttagagactgagggtattctgaggatggctctgataatcagcacataggaaatgatcacgaatccaaagggaatgaggaagatgaagcagcctgtggcaatcagcactgtgtgattaatctgaatgttggaacatgccatcctcagcaatacatacatctcacagaagatgtagtggatttttcgtgacccacagaaggtcactctggtcatgaggagggtgtgtatgaggccatagaggacggataggacccaacacaaggaaaggagtaagatacagagcttagggctcatggctgtggtgtagtggagggggcagcagatggccacatagcggtcatatgccatcacagccaggatgaggttgtccagggccaccaaggagaccaggaagtagagctgtgtcagacaccctgcataggagatggctttgttatgggactggaggttcaccagcatcttggggattgtgttggtgacaaagaagaggtcagtgaaggagaggttggccaggaagaagtacacgggggtgtgcaggcgggaatcagagctgatggccaggatgatgagcacatttcccaccaccgtgaccaggtacatggacaggaacatccaaaacaggatccgctgctgctcaggactctctgacatccccaggagaaggaactctgaaccttcactctggttgcctccatccatttccccaactctcttttaacattaacaccagcaaatgtttaccaaaagtccttaattgaataaaaacatgaagataagcaaaatcaacattttcttagaattaagaatgtcttacacccaattttataatttttgaaaataagaaagtgaaaaatataacaaagtttttatgcgatataattatttcagctacttcaaagctgggaaactcaatgttaaaggaataatgtgtaattcttattttcaatcctgtcatcttacactattcttgaagtgtttggtgattagtgtgttatgatatgtatatgtgttaaaataattaatatagatacatgcagtataagtagttcaaaaaaggaagaaaataaaagtatttgaaaggagtaggaacaattattatttgttgatatgatgatctatctgaaaaaagtgggactatccactgaaagactactagaaatagagtttagaatacttgaaatcaagtctttccctgctagtaagatagtacgcactgccacttacttgctgtgaaacctcaggtagggttccagagttccttaagactcagtttcttcatgcgaatcatgagttatagggtgggggaaaattaagtagtaaagtgcttaacacaaggagttggtaggcaattagcactcagaaatgttgcctattattgttatatttaacgagaatcaggaaaaatgttataatgaaaaactatctcatccccactgtcaacaaataaatcatggcactcagatgttaacaagaatcaggcgaaaccttcaaattctccagtgaggggtaaagtaaaaattaaataaattgataaacatatcaaggtttctaatatgaagagaagtgtcaccaagctatatactcttttgaattaattgaaagtttactggatatcaaaattataacagggttttggagaaatgaaactggtctaaatttcatctaaatataagcatgtagataagctagaaaaacattgaataaaagaataacagggtgatgcttgcacatcaaatattaagaattctaaagcaatatgatagtaatgttggaatgaacagatcagtagaaacttcacagatagacacaaaaacgtggaatttggcagattaatttgggtgcactgtatattagccggtaaattctgcatgggtacactctatattagcaagtaaagcctgcattattcaagaaatggcacattgagataactgtgtaattaatttcggaggactagttcgaacaatattttgtatcttatcaaacacatttaaaacatactaaagattaaaatactatagtgtgcctttttttccttcgaaagcctaatgtgtatagaataaaatgtttaaaaaatcaaaaaagaaaaaagaaacatgtatatgtaaaaatataaaaaaatgtagtatatataaaacagctgaatgcggtcagggaaagagtaagatctcttccaatactactgacagttctcagtgactgtgggaactaagcaaataggtaaataccaataaccagccccattaggggagactagtaccctgaattgttacaataaattatctaaaatgtccatattccaacaaaatttatgaaccatgaaaagaaacaaagtatgatccacatatgaggaaaaaatcaggcaacagaaactacctgtgagcacaatgtgatgtcagccttctttgaaaagacctcaaagtagccattgaaaatattttcacaaaactaagagaaagcatgattagggaagtaaaggaaggtacagtgagaatgtcatgacaaatggggaatatcaataaaaagaatggataaaagagagccaaatggaaatcctgcagtcaaaatgtacagtaactgaaatgaagattttattagtcaggctgaatagtagtattgaactagcagaaaaaatagcattctttaagatagattgatatcaagctgaaaaatagaggaagagaaaaaatgaagaaaaatgaacagagactcagaaaagtgtggagcaccattaagcataccagcacacatggaatgcaagtgctgaaggacaggagagagaaaaatcagaaaaaaaatccaaagaaagaatggctgaaaacgtagtaaatttgtttaaaaaactacacatataggaaactcgacaaactttaggcagaataaatacaaagagattcacaaatagacacatcatagtaaaaaggctgaaaggcagagacaaggagaaaatcttgaaatcagcaagtaaaaaagattttttacttacaaaggaagcctaataatatgaacaacagacttctcaacagagacaaaggaggctccaagacagttggataacatattcaaaatggttgaagaaaaaacccatcaagtaagagtctaatattcagcaaaactatctttaaaagaatgaaggccaaataaagattatctcaggtgaacaaaaacacagaaaatttttgctagcagacctatcttataaaaactactaaagaaatttctttaggttgaaagtaagttacctcagatgataatttgaatccacatgcacaaaaaggaaagaacagtgataaagtatgaaaatgtgatattataaatgtatgtaaatatgtaaatatatattgatataatctatatatctatgtaatattttacatatatctattaagtatgacagtataaattcatattttcttgttttttcttataacttatttaaacaccatttatgtaagataatatgtatatgatgtatcgttgaggccatagcatatagaaatatatgtataacatgtttgtcgattacagcataaaggagctgggtggaggcaaagttggactaaggaaatgactacagaaggtatagtagtaattataacagtggattatcaggattaatagatgttacatctgtaacaataatactacaaaaggaagaaaataatagaattatatagaaatcattttctatatatcattggacttaagttggtataaatctgcagctgattctgataagatgtatgtggtagactttagagcaaccactaaaaattaccttcaaaaatagagtgaaaaaattattaaagaaattaaaatgcaacatgagaaaatattaacttaatggaaaaggaagtggacaaggaaaatagaggaaaaaaggacatgggacacatagaaaacacaaagtaaaatgggagacataaatctaactatatcaatcataacattaagtgtgaatgcatagaacaattcaatcaaaaggcagagactgtcagagtggataaaaacatgattcatttatatgcattctacagaaaacctacttgattcacagatacagcaaggttgaaagtaagaggatgggaaaagataccatgcaatcaggaaccacaagaaaaacggaatggctgtactttagccttaaaatataaaatggctttaaagattaaaatagagtttatgctgacctggtggcccatgcctgttaatctcatcactttgggaggctgaggtaggagaatggcttgaggccaagagttcaagaccagcctgagcaacatagcaagaccccatctcttaaagagagtttaagtcaaaaagtctgactagagataaagtgagacattttataatgacaagtgggtcaatctatgaagaagatataacaattgtaaacatatatgcacccaaatacgtgaagggaactgatagaaatgaagacagaaatgtgtaattcaacaacagtatttggaaaattcaacacaccactttcaataatggatagaacaactagaaagatcaacaaggaaaaaaagatttgatccacactgtaaattaactgcgcctaacagatgtctatgtaacgctctgcccaacaacaaaagaagaaagttattttcaagtgtcatgggaacattctctatgatagaccatattctaggccataaaataaacccaaatgacattaaaaggctagaaaaaatacaaagtatgttttcccactgcagtagaataaaattagcaatgaatagcagaaaaaattgaaaaacatgtttcatttccatatgttacttcatttccatattgtggaggataatatacttccaagaaggttcttccaggaatttatccatgtctgttaaatgttctagtttgtgtgcgtagaggtgttcacagtagtctcgaatgatcttttctatttctgtggtgtccattttacaatggactttaaaaaaacttgaaagcattcctactgagaaatggaacaagacaaagatgcccactttcattacttctattcaacatagtactagaagtcctagccagagcaataagacaagagaaagaaataaagggcatccaaattggaaaagagtcaaattagtgctgtttgccaatggtatgatcgtatgctgagaaagctctaaatacgagtccccacccccaagccaagggaggtggtgagtgagcatgctacccagccagggaaatcatgctttttccatggaactctgcaacccacaaatcagaagattccactggtgaacccatgccactggtgcctagggtaccaaccccagagctgtgcagattctcaacagcctctcagctagaatctgcttaagcctgccaagttccttgagggagagaaaactagcaccatagctgcagctgcctgctgtctaagctgtttgagctccttgcaggaggggcagcacccaacattgggactgataactgcctagcacactaagctccctgggtgggggaagggcggcagccatctctatagctccagcccacacttttcccctgccggagcctgggagactggttgacttggtcccaaaatgtgtccaccacagcccaacacacccctatggtcgactgtggccaaagcacctcttcaggcctgaccctgacccactcttcctcactgggtggggcctcaatgcaggaagtacaacttcagccaggggctcagggacagtaccctgatctccctgggcctgagcccctagcaggagaggtggccgcaatctctgtggatcagcagacttagcctttcctcctggtagttctgaggaatccaggtagcccagatgagtgggtttcccctagtgaagcgcacacccccttcaccaagggacaaagtgcttcgttaaacggatctttttccctgtgccacccaactgggtgagaccctccaacaggggatgtcagacaccctatacaggagtgaacctactcgtatcacgttggtgccccttgaggtcagagatcccacaaggaggagcaggcacccatgattcctgttctccacctccttgagtgatacctccaggcacagcagcgaaccagatgaatagggcctgtaatgagcccccaggcctactaaagaagagggacctgagcattgaaagaaaaacaaacagaaagcaacaacagcagcatcaacaacagcaaaaaagtcctcacaaaaaccccatccaaggggcggcagcctcaaagatccaaactagacaaactcatgaagatgagaaacaacaacaacaacaacaacaaatgctgaaaacacaaaaggccagcgtgctgctgcttctccagatagttgcaatacctcgccagccaggaagcagaactggatggaggatgagatggctgaattgacagaaataggcttcagaagatgggtaataacaaactcctccgagctaaaggagcatgttctaacccaatgcaaagaagctaagaaccttgataaaaggttacaggagctgctgactagaataatcagtttagagacgaacataaatgacctgatggagctgaaaaacatagcatgagaacttcatgaagcatgcacaagtatcaccagctgaaccgaccaagtggaagaaaggatatcagagtttaaagaccaccttgctgaaataagggatgcagacaagattagagaaaaaagaatgaaaagaaatgaagaaagcctccaagaaatatggactacgtaaaaagactgaacctacgactgattggagtacctgaaggagacagggagaatggaaacaagctggaaaacacacttcaggatattatccaggagaacttccccaactagcaagacaggccaacatgcaaattcagaaaatacagagaacaccactaaaatactccatgagaagatcaaccccaagacacataatcatcaggttctccaaggtcaaagtgaaggaaaaaatgttaagggcagccagagagaaaggtcaggtcacctacaaaggtgaccatcagactaacagtggatctctctgcagaaaccctacaagatagaagagagtgggggccaatattcaacattctgaaagaaaaaaattttcaacccagaatttcatatcctgccaaactaagcttcataagtgaaggagaaataaaattgtttccagacaagcaaatgctcagggatttcatcaccaccaggcctgctttacaagagttcctgaaggaagcactaaatatggaaaggaaaaactggtaccagcgactgcaaacacacaccaaaatataaagaccaatgacactatgaagaaactgcatcaaccagtgtgcaaaataaccagctagcatcatgacaggatcacattcacacataacaatattaactttaaatgtaaatgggctaaatgccccaattaaaagacacaggtggccaatttggataaagagtcaagacccatcagagtgctgtattcaggagacccatctcacgtacaaagacacacataggctcaaaataaagggatagaggaaaatttaccaagcagatggaaagcaaaaaaataaaaaataaagcaggcgttgcaatcctagtctctgacaaaacagaccttaaaccaacaaagataaaaaaaggcaagggcattacataatggtatagagatcaatgcaacaagaaaagctaactatcctaaatatatatgcacccaatacaggagcacccagattcgtaaaagaagttcctagagacctacaaagactcatagactttatgtgtctatgcgtctttaaagtgggagactttaacaccccactgtgaatattagatcaatgagactgaaaaataacaaagatattcaggacttgaactcagctttggatcaggtggagctaatagacatctacagaactctccacccccaatcaacaaaatttgtctcagtaccacatggcacttattctaaacttgaccacataattggaagtaaaacgctcctcagcaaatgaaaaagaactgaaataataacagtctctcagaccacagtgccatcaaattagaactcaggattgagaaactcattcaaaaccacacaattacatggaaattgaacaacctactcctgaataacttctcagtaaataatgaaattaaggcagatatcaagaagtagtttgaaaccaatgagaacaaagagacaatgtaccagaatctctgggacacagctaaagcagtgttaagagggaaatttatagcactaaatgcccacatcagaaagctagaaagatctcaaatcaacaccctaacatcactattaaaagagctagagaatcaagagcaagtgaatccaaaagctagcagaagacaataagtaagatcagagcagaactgaaggagatagagacacaaaaaaacccttcaaaaaatcaataaatacaaaagctggttttttgaaaaaattaacaaaatggatagactgctagctagactaacgaagaagaaaagagagaagaaccaaatagacacaataaaaagtgataaaggggatatcaccacttatccacagaaacacaaactactatcagagaatactataaatacccctacgcaaataaactagaaaatctagaagaaatgaataaactcctggacatatacaccctcccacggctaaaccaggaagaagtcaaatccctgaatagaccaataacaagttctgaaattgaggcagtaattaatagcctaccaaccaaaaaaagcccaggttcacatggattcacagccaaattctaccagaagtacaaagaggagctggtaccactccttctgaaactattccaaacaattgaaaaggagagactcctccttaactcattttatgaagccagcatcatcctgatgccaaaacctcacagagacataacaaaaaaagaagtcttcaggccaatatccctgaagaacatcaatgcaaaaatcctcaataaaatactgtcaaaccgaatccaatagcacatcaaaaagcttatccaccacgattaagttggcttcatccctgggatgcaagtctggttcaacatacataaatcaataaacataatccattacataaagaaaaccaaagacaacaaccatacgattatctcaatagaggcagaaaagcattttgataaaattcaacatcccttcatgttaaaaactctcaataaactaggtattgatggaacgtatctcaaaataagagctatttatgacaaacccacagccaatatcatattgaatgagcaaaagctgcaagcattccctttgaaaaccggtacaaggcaaggatgccctgtctcaccactcctgctcaacatagtattggaatttctggccagggcaatcaggcaagagaaagaaattaaggggattcaaataggaagagaggaagtcgaattgtctgtttgctgatgacatgattctatatttagaaaaccccatcatttccaccccaaaacttcttaagcgataagcaacttcagcaaaatctcaggttacaaaatcaatgtgcaaaaattataagcattcctttacaccaacaatagacaagcagagagccaaatcatgaatgaacctccattcacaattgctacaaagagaatgctcccaacacaatgaaatgataaatgtctgaggtgatgactgtcctaaatatcctgatttgatgattacacttatattcatgtatcaaaatatcacatgtacccccaaaatatgtacagttattactgtacatattaattattactgtacatattattgcaatgttttggaaaaccagccagtgtgccagggaagtatggagcctgttctgcaaattcaatctgaaacatggttaatttgaagtcacagcagaataagcaaatggagatgagggaactgtgagtaatttcgactattaaagtaatttggagtgccagatttggggtggggtgagggtatatggcagtcctagcattcatcaaatgagtgaattccttacctcaatgtagcaagttaaactcctagatgtccacggtaggtggcatagtggaaggagattttgagtctgaagtttgggttcaaaccccagcgtaacaaattcaagcattttttgaacaaactgcgatttcattagacacacacatacatacatacctacggtgctatgtatatacatcttttatttacaacgacgtatatcgttgtaacaacgagctatttgtttctgttatcctgctttatagatgaggtgactgagatttaggttaatgagtttctcacattcactcaatcagaactgacacattgggatttgagcccccgttctgcctccagatttcacaatctaactattctaccatgggatggaggacagcaataatgcccacctcccccggggtcaggagaaagagctgaaatgctgtatgtggaagcagctctccaaacttaaagcctaattgtccttggaaggggcctgtgatgggggtggcaaagggactcctattcttcattcctccaacttgtatttcccacccctttctagtagggaacccactctctcagtacaaagagcaacagggttcccagtcttgcctctatcctggttctgctgccctctcagacaggagcagctggaccccactctgtctgtccggaatggtccaggatgtcagggtgggactcctggtgtcaggcctcatggtgcaactgcaggggagacagaagatgagggcacacggtattacaggcttcccacatcacaaatgacttctttctgcagtcttgttcttaccattcagagctctatgggacatctgctgatgggagggagggtagagggcaggtgacaagactgaggaaggccagagaactcccagggaaattgagaaattgatccctctgcttgcttgcttccttttttcttctttcttttcctttctttttttttgaaatggagtctcactctgcccaggttggagtgcagtggcacgatctcggctcacggcaatctccacctcccgggttcaagccattctcctgcctcagcctcctgagtatctgggattacaggcgtgagccattgcatctggccagatacctctgctttgtaacccacaaggcaagcatctcctgcactcatgtgcatcacgatcacctgtgatgcttcataacaaaaagctgactttctgactttctgactctctctcttgaagtcctgaagtctctcttgaagtcctgtttctgagaaccaagttctttttagcaagcatgcagtagttctgatgctatactttgggaaacactgctctgagtttgtaagagtcagtgggttctgaacactgatgtggtcagatggtcacagagacacagacccctctgttgtgttgctggggtgtgaggggggagattgtaggggcaatatggaaaaggggtccaagcttgcagtggaaacactgggctttgtacctcttctgttacttcctagctgtatgaccttgagtagggcccacgacctgcctaaatcccctcttctcacctaggtagtcattctcacaggctgtgagaattacatgcaacagagaatgtgaaagtaccttgaaaactgtagagtgcttctaagattcaagggattgttctattacctttgaagactaagaggtgagattacatgagttcccaaagtgtgtgagtatgtttgtgtgacagagaaaatggagaagagagaagataagagagaagataagagagaagagggagaaagagcatgaggctgagatgtacagaccttacccactgctctgtgctgctctcagagttcactggttcagcttcctccacgttcctgttctacaggatgaaaacacattcaggtcataaaagaccagaatgcattattttctgaataggtcttggagactcatcctattggctaaaggtacagagcagagaacttgttgcctgggtcttcagcttctgtaaaaaaggagacaggatttcaggctattgatgccccaatgagatttgtgggatatgagaactgagtcttggatcctagattcatgaagaaacgggatgaacagggagcacatcaggtctgcttatccattttggagagaacttggggatgcaatccccagatagcctcttgagatgaacatggataattgctccgatgttattctctagaggtgagggtcttgggaaatgagtcttgtttacaagaaataaaccagctccttattgtgcagtaatcctaaaatataccctaggaaggctgggtgtggtggctcacacctgaaatcccagcatttgggaggccgaggcaggcagatcacctgaggtcaggagttcatgaccatcttggccaacatggtgaaacccccatctctactaaaaatacaaaaattagttgggcgtgctggcacttacctgttgtcccagatgcttgggagactgaggcaggaggatcgcttcaacctgggaggtggaggttgcagtgagccgagatggcaccactgcactccagcctgggcaacagagtgagactccatctgaaaaaaaaaaaaataaaagataaaatacatataacagtaagccaaagtaacagtaagccaaaaataaagcggactctacatgtattgcctgttgactttgagtagggagaggtctggcaaatttaaggtactaaacttcaactagaatgattccagatgtctgtgacccaaagtactaagcaaaagcaagaaagaaatcctatttagaggaacataatgtcaccttagagctgaaataacagaattatttctgttaataatttttcaagcacaatatccaacataaacccaaagataaaaagacacaaggaagattccaatagcaagaaccaacacaggggaggcatatagggactctagataatatagttattagacatagatggaaaaataatgatgctacattattttaggaaataaaatgaagcctgaaaattttatcaggaatgtttacaaacaggccagtcatgagtaaccagcactcagatgaaaaacacattactgaccctccagaaatgaccaaatattcctttctagtcactgttcctgcacaggtactcactatcctaactgctaatatcattaagctagctttatctattttcttactttatttaaatggaagtatacagtttgtactcttttgtgttggcgtttttcactcattgtatatgtcagattcatccacacagttgtatgtggttgtaggttgttcatgctcattgctgtatggtgttctattgtgtgaagagaccactaaacacccattgtgggcattagtagtttccggtttttgtcctgagtcgtgtagctacgcatatctcttaggcatatatacttaagagtggaatttataaatcacatggcaggcctatgtatagtttttgtagccagtgctaaacacttttccaaagtactagacttgtatcaattttccctactgccagcagtgtatgagagttctagttgctcaataccttaacatgatttggtatttttcatccttttcattttagctgttgtggtgagtatagcggtatctcgccatggttgaatttttttttttttaaaaaaagatacataatagaggtacatgtgataatttaatatcttcataaaatttgtcaagatcaaattggtgtaattgggatatatatcactttaaatagttgtctttttttatgctagaaacatctgaattgttccccttttactattttgaaatatacaatagatgattgtaaactatattcagtcttactgcttctatcaaactgtacttttgtacctattaatcaacatttcttcctccccctcccctcactcttcctggcctctggtgaccaccagtctgctcgtttatcatcatgggatccactttttaaactttcacatgttgagtgacaacatataatatttgtgtttctgtgcttgacttatttcaccgaacataatgacttctagtttcatctatgttgctgcaaaggacaggatttcattttttttttggctggataatattccactgcgtatatatgccatattttctttcttcattcatcctttgatgggcatttgggttgattccatattttggccattgtgaatagtgatgcagtaaacgtggaagtgtagatatctcctcgatacattgatttcttttcttttgaatatatgtccaagagtagaattgctgatttccatttacatttctctgatgactaatgaagttaagcacttttcatagagttattatccaaaagtatattgtctttgtaaatcacctactcaagtgttcttctcatttttttctattgggttatctggttttttttaaatgttgatttgtaattcttcatattttctggctatgagcctttgtcagatgtttgtaacaagactatcttacccacctttgtgggttggcttttgttcaattaatggtgccgttagagaaatagaagagttttaatgttttaatttatcaattgttaaataattagtgctgtctatatcttaagaaatctttgctaaatttttgtcatgttctctatgatttcatcaggaagatttgcttttacctttcacatttagatctgtgatcaatgtggaattgatatttatatttggtgaggtagagatcaacatacatttttcttcctgaagtgtggatattcaacggatccagtgccatttggagaaaagccgtcctttccctgctccatcacagtggaaatctttatcatcagtctggtgactatatatatgaatctgtttctggaatcttaatctcttccatttgtcagtttgcctatccttatatcaatagtctacatattaattattatatcttctaataggattgctatatggtttgcttgttcttcttcttcagtatttcctttttttctttttttgacacagcccaggctggagtgtagtgaatggcgtgatcttaactcactgcaacctccacctcccgggttcaagcaattttcctgcataagcctcctgggtagctggaattataggcatgtgccagcatgcccagctaatttttgtatttttagtagagacggggtttcactatgttggccaggctggtcttgaactcctggcctcaagtgatccacctgcctcagcctcccaaagtgctaggattacaggcatgagccactgcacctggctggaattcgtgtccttttaaaagagactccagagagctcccttgtccccttctgacatgtaaagacgcagcaaaaagatggccatctgtgaatcaggaagtgggtactcaccagacacggaatcttctggcaaatggatcttgaacttcccagcctccagacagaactgtgagaaataaatttctgttatgtatgtcactcactctatactattttgttatagcagcctgaatggattaagatatgctgtttgaaggtattgagaccctgtcctgttcctcaacagcttttagggttttcgtttatatttggtttcagtagttttctccaatatgcctatgtttggttttctctcgatttatactgcttgagatttgctgagctccttcaacctgtagtgttatgtcttttatctgtttgaaaaattcttggttaattatcttctcaaatatatgaccctgttccattctctttctcctgtccttctgggactccagtgatacataattaggccttctgtgcatgttccatttatctcttatggctgtatctggggtttcttcctttaattttttttgcacttcagtttaggtattttatattgacttgtcttctagtttattgattctgtatcttgctatgtccaacttgttaaattcatgcactgagttcttaatttcagatactgtagtgttcacatccagaatgtccattgtgctctttatgctatttgctagtaaaattattcatctttttatctatttcacatactaattgttatcttaaattccttgtctgccacctctaagatcagagtcatctttcaatctttattttttggtcttaattattaggcatgtaattttgcctcttgcctgtgtgtagtaatttttttagtatgtgctgggagtcatggatactagggttacagtggcttcaagtgttgttacctctaccagagatggttcttcttttcctctttaatgcagatacggtgagtgggttcatcacctgaattcaatcaggaattggtttgggcttaggattaggttgtaactttaggaaggttaagtttacttctgttcctaggttgtttcctttttgggattttcatgcatcttgatgtccttagccctgaaaagtagtgagaaattttcttcagaggtttttagcttagttctttggactttgcctccatgcaaattcaatgtttggcaaatatcttgagggagagaccagaggcgtgttcgaaaaaggcctcttctaacagtgtgtttgcttcctcagtcctgaaagtcggcaggagatttttttccgtcttttagtagtgtctgcctagatttccagcattcttatcagagtcagcaaatgtctcatgcggagaatagtacaggggtttgaggcccctcatgcttcaaaactgttattctggtcttgcgtgagtgctacacgctttaatgctttcatttccccggcacagatcctctacctaagtctgtgcccagattcagcaactacttttcccaagggaaaaaatagctagttggagtaacctcatcttagaatggtcaccctctctctgaaactttaggttatgtagtttttgttgcttctgcaactctttgatacctttaaattatgattttaccttttaaaattatgattttaccttttaaaattctaattgttgcaggaggatcattttagcttgctagaacccactatatcctgtgtgcaagcagaggtctgcctcttttatttttgaagagacttgtgtctctggcattgtggcttatgcctataatgccagcactatgggtggctgaggtgggaggatcacttgaggtcaggtgtttgagaccagcctggccaacatggtgaaaccccgtctgtactaaaaatacaaaaatgagctgggcgtggtgacatgtgcctgtagtctcagctacttgagaggctgaggcacgagagttgcttgaatctgggaggcagaagttgaagtcagcagagatcacacctttgcactacagcctgggtgaccaagtgaggctctgtctcaaaaaaatgtcaggaaatcttagtttggttacaacatttggtggacaaaagagggtataaatcacactacttgtacaagaaggtattctttggcaactattatcccttgatggctcccccttatttacttcaccagatgaattaaagttttattttattctcatgttgaaatgaagattagtgaagaatatttataggtgtccctatttctccagtatgtgtaattgaggccctgtttccactcccttaatgcaggttaccatcatctctcacttgagttactgaaataaccttgtaaatgattaatctgcctttctgattgattaatgctagtctagtctcctcacttcaatcagatttacatttctaccaattaaatctaagcatctaattgccctacctgaaaccagtcagagactttccccttgggatgaaggtggtgctgctgactgcatctcacaaggccttgaggagcaggacattgcctggttccctttctccccttcagttctctgcttcacacgatacgcgtccggacacagaacgtcctttagtttcttgagtatgccatgttgtcttgacctcttgagtctttgcaaatgtggttacttttctcagaactccactttctccccatttatctttttacgccctcttaacccgtaaagacccaagataaagttgtcatatgtggctgggagaaattaggaagtaattgtgtagaggtagcaattgtattgtgtttagagactgggattagatttcaacattcagtgatgagggatgtgtggacataactcaaagtgggttttcctaaatgtagcagagataaatgatggggccagatgattgaattagttgatcaataaagaacgtttctttcttcatttttaggataacatttttgaagtaataagtggacaatacagagcaattcattatattttggaaagcaaatattttaggaattaaaataatgaaatattcaggctgggtgcagtggcttacacctgtaatcccagcactttgggaggccgaggcggagggatcacctgaggtcaggagttcaagaccaccctggccaacatggtgaaaccctgtctctactacaaatacaaaaattagcagtggtgggcacctgtaatcccagctacctgggaggctgaggcaggagaatcacttgaacccaggaggcggaggttgaagtgggttgagatcatgctgctgcactccagcctgggcaacagagccagacttcatctcaaaaactaaaataaaataaagaaatattcagacaaggaagagatcctgtggactgctgtggtctgagcagcattcctggtgggacttggggatgatcttgcttcctcttctgcctgttctcctaccccagaatgggcagctataaagtactgcctgctctagacctcctaggagatttgtcccaggggatcatgggcaattactttgtttgttgttaataagtttcaccagggcctggggtccaatgggacctactgtctctagaacctggaaaacatagactgggagatatgtgaagggacggggtgggcttagatgatgacgacagaggctgtatctccatgtgtctaacgtgcataaaagagcgaaggctcccaggtcaaggcctcgggattcctttcagacattccttgtaagttaggctggaagctgtgtccctctgggtcctttcgaccttcgggtcctgattactagggttctatggtgtgactatgtgggactgttctttaggtactgtaaaatccaaattactgtttaacattctagaaatatcttgattgctgtttaccagattcaatttctttatttaaaatggtattcataaatacagttgccccatgaacaacacaggttttgaactgcataggtccacttagattttcttctgcctctgccaccctgagtagcaagactaaccccaccctgagtggcaagaccaactccttgtcctcagcctcctcaacatgaagacaacagggatgaggagctttatgatgatccatttctacttaatgattagtaaatatgttttctcttccttatgattttcttagtaacatcttttctctagcttactttattgtaagaatataacatactaaatgtgtgttaattgactgtttatgttatctgtaaggattctggtcaacggtaggctagtaatagttaagttttggggcagtcaaaatgtatttgtgtattttttttttttttattgatcattcttgggtgtttctcgcagagggggatttggcagggtcataggacaatagtggagggaaggagggaaggtcagcagataaacaagtgaacaaagatctctggttttcctaggcagagtgtttgtgtccctgggtacttgagattagggagtggtgatgactcttaacgagcatgctgccttcaagcatctgtttaacaaagcacatcttgcaccgcccttaatccatttaaccctgagtggacacagcacatgtttcagagagcacagggttgggggtaaggtcatagatcaacaggatcccaaggcagaagaatttttcttagtatagaacaaaatgaaaagtctcccatgtctacttctttccacacagacacagcaaccatccgatttctcaatcttttccccacctttcccccttttctattccacaaaaccgccattgtcatcatggcccgttctcaatgagctgttgggtacacctcccagacggggtggtggccgggcagaggggctcctcacttcccagtaggggcggccgggcagaggcgcccctcacctcccggacggggcagctggcagggcgggctgcccccccacctccctcccggacggggcagctggcctggcgggaggctgaccccccccccacctccctcctggacggggcggctggccgggcagaggggctcctcacttcccagtaggggcggccaggcagagacgctcctcacatcccagacggggcggcggggcagaggcgctccccacatcccagacgatgggcggccgggcagagacgctcctcacttcctagatgggatggcggcctggcggagacgctcctcactttccagactgggcagccaggcagaggggctcctcacatcccagacgacgggcgaccaggcagagacgttcctcacttcctagacggggtggcggccgggtagaggcgctcctcacatcccagacggggcggcggggcagaggggctcctcacatcctagacgatgggcggccaggcagagactctcctcacttcctagatgtgatgggcggccgggaagaggcgctcctcatttcctagatgggatggcggccgggcggagacgctcctcactttccagactgggcagccaggcagaggtgctccccacatcccagacgatgggcggccgggaagaggcgctcctcacttcctagatgggacggcggccgggcagagacgctcctcactttccagactgggcagccaggcagaggggctcctcacatcccagacgatgggcggccaggcagagacgctcctcacttcccagacagggtggcggccgggcagaggctgcactctgggcactttgggaggccaaggcaggcggctgggaggtggaggttgtagcgagccgagatcacgccactgcactccagcctgggcgccattgagcactgagtgaaccagactccgtctgcaatctccgcacctcgggaggccgaggccggcggatcactcgcagttaggagctggagaccagcccgaccaacacagcgaaacccgtctccaccaaaaaaatacgaaaaccagtcaggcgtggcggcgcgcgcctgcaatcccaggcactccgcaggctgaggcaggagaatcaggcagggaggttgcagtgagccgagatggcagcagtacagtccagcttcggctcggcatgagagggagaccgtggaaaggggagacgagagggagaggagggagaggagggagaggagggagacgtatttgtgtatttttgactgcacaggggttggtgcctttaatccctgtgttgttcaagggtcaactgtattacatagtggagtcacgtaaagaaggaattttcataaaagatttcaactttatcactgctttgtgccatcagcagggttaagtcagtactcctattttacagctgaagaaattaagatgcagagaaatgaaaagagcaggcaaagcccacatgcctcatctcctcagtggcagcatttgtgatatctgactgatttgggctctgtaatcacacattttaaaaagagatggtaccaacttagttcccaggatggaaattcccagagaatcaaagatagattcttctcatcagtaaaacacagcaccacatctttcattttttctgtacacattaatctggccgggttaaaccccacgatcctgttaaataccctgtagtgagaggtcccttctgtatcttcagggtttgtagaagttctgaaaactccccaggactgcactgtgagagaggcatctggaggagaccaggagccaggtcggagagattggaaatgtccttaatcctttccccgtgattttttcttttttttttgatacagagtctcactgttgttgcccaggctggagtgcaatggcacgatctcggctcactgcaacctccacctcccaggtataagtgattctcctgcctcagcctcctgagtagctgggattacaggcaccctccaccacgcctggctaatttttgtatttttagtagagatgggctttcatcatattggtcaggctggtctcgaactcctgacctcaggtgatccaccgaccttggcctcccaaattgctgggattacaagtgtgagtcaccgcacctggccttcccatcatctttaaactttcacatcagtctcatttctgcccacatcaatatcttgatattgggtaggctgaatcacaagaaaagaaaatcgtagccttgtctgggtagattggcattaagccatgttacagggtagctgaggatggggtaatattttggaatgaagctggcaagcctacagtgcagttacctagaaatcaaaacaaaggatttataagaaggaattcttgatttggaaaggcccagtggcagtagatgttctaacctccagtagttttggtttctgttgaaataattcagtagtctcttaggtagcacaaatatatatatacatattttgtggcacacattgctgtagatgttggggttcatcagtgaacaagatagatattttctcaattattaaagtctagcaaagagcaagtcctcccagatttaatgatctaaaggatgagtttccaggagaagagatggaatggggttgagacagcaagttcaaggcagtggtactgtgatatgtcatggtgggtgagagcagatgcttttgagatactaggagaaatccagtgttgttcctggagtagagagagagaggtaagcaggagagaattcacctggtaaaacagggtcttatggttcatattagctattttggacattatcttaacagaaatgagaaactctttaattagatagtgacatgagcaggttgagttatgaaaaggatgattcaggataaagtcaatagatttatttatttttattttttgtttttatttttttgagatggagtctcgctctgtcacccaggctggagtgcagtggcaagatctcggctcacagcaacctctgcctcccaggttcaagtgattctcctgcctcagcctcctgagtagctgggattacaggtgcccgccaccacgcccggctaagttttttgtatttttattagagacggggtttcaccatattggtcaggctggtctcgaactcctgacctcaggcgatccactcgcctcagcctcccaaagtgctgggattgcaggcatgagccaccacgcccggcctcaagtcaatagatttaaagagagcaaaaatatatgtttggagaccatgtctgcctcagtggtgcaggtgagaaaagtagctgacctgaaaggtggctgtggggtgcaaactatgagcacaaggagggatgtttagaaggtggaattgataagatgtggtaattgaatgagggaactgaagggtaggcaagagtcaaggatgactgtcaggtttctggcttggggaccatgtagatggcataggcagcaagagaatactggagtggaacacacgtgggtcagggaagacagcagacttagtatcagaaagatgaagcttgtggtggccatgaaacatgcaaataagatggtcatcagggagctgaacatccaggtctgtagctcagaggaatggtgtgggttgaagaagtacatttgggactcactggcatatttgggaaatgtgtaaggacagtactctgagaagcaccaatattcaaagataatggaacaggagcagttgtctgagaagagtgtgaagtattgcaaggtagggagggagagcgtcacctggccaagtgaggggagggtatcatggagtaggaagtgatcattagtgttaaatgtgataggtcattggatttagagatggggatttagagtcatcagtggcttcgactgggaaatttcaatagatgatggggttcagaggccagtctgctacctgtgcctacattctcattcatggtctctttgcaaataggccacacattatagagatatgtttattggttacctgtaggtgttaaggtgcattatattcttcttaaggataatagagtcacagaatgatgaagaagaaccaaaccatgatctcagagttcctgctcctgggccttccatccaacctgagcagcagaatctgttctatgccttgttcttggccgtgtatcttaccaccctcctggggaacctcctcgtcattgtcctcattcgactggactcccacctccacatgcctatgtatttgtgtctcagcaacttgtccttctctgacctctgcttttcctcggtcacaatgcccaaattgctgcagaacatgcagagccaaaacccatccatcccctttgcggactgcctggctcagatgtactttcatctgttttatggagttctggagagcttcctccttgtggtcatggcttatcactgctatgtggctatttgctttcctctgcactacaccactatcatgagccccaagtgttgccttggtctgctgacactctcctggctgttgaccactgcccatgccacgttgcacaccttgcttatggccaggctgtccttttgtgctgagaatgtgattcctcactttttctgtgatacatctaccttgttgaagctggcctgctccaacacgcaagtcaatgggtgggtgatgtttttcatgggcgggctcatccttgtcatcccattcctactcctcatcatgtcctgtgcaagaatcgtctccaccatcctcagggtcccttccactgggggcatccagaaggctttctccacctgtggcccccacctctctgtggtgtctctcttctatgggacaattattggtctctacttgtgcccattgacgaatcataacactgtgaaggacactgtcatggctgtgatgtacactggggtgacccacatgctgaaccccttcatctacagcctgaggaacagagacatgagggggaaccctgggcagagtcttcagcacaaagaaaatttttttgtctttaaaatagtaatagttggcattttaccgttattgaatttagtaggtgtagtaaagttgataatgaaatatcactctaaatcagtggcttaaagattttttaagaccactaaacctttagtttaaacaaaactctatgctaaaggctaacaggaaaaatatgacaacagacctgtgtttggagtgaagttgggggcaggaagccaggtgctaagtatgcttcttccttccttcccaggtggaaatgaagcttgaaaataaacgttaaatatctttgtgccaacacctattatccatattagttgggaattaactttttttttctttttttgagacagagtctcgctctgtcccccaggctggagtacagtggcatgatctcggcccactgcaacctccacttcagggttcaaacaattttcccacctcagccgcctaaggagctggagtacaggtgcatgccatcacacctggcttatttttgtatttttgtagagacggggtttcacatgttggccaggctggtctcaaacccctgacctcaagggatccacccaccttggcctcccaaagtgctaggattacaggtgtgagccaccacgccaggccttgggagttaacttcttaaatatcactgtaatctttgtgttcatcctgctcaagaattttcaatgacattctcaaatggagaaaagaaaaaccccaacattttctgtcttagggagcacatgtactcctagagttctgtgcttccaataccttactctttgctgttgaataaaagcatttatttccttctctgcatacatatcctcacatcattctatcctttaatttttatgtaattttccagacctcgcagaacaacctgtctgtaaaagagctaataaatagtaaacccttattgggtggttttctctgtgtaaggcactttcacaacctactcacataccaacactatgaagttggtcccatgattatcccaattttatgaataaagagacagaggctgggcatggtggcttacgcctgtaatcccagcactttgggaggctgcagtgggtgggtcacctgaggtcaggagttcaagacaagcctggccaacatagcgaaatcccgtctctactaaaaatacaaaaattagctgggcatggtggcacgcacctgtaatcccagctacttgggaggctgaggcaggagaatcgcttgaacctgggagacagaggttacagtgagccaagatcgtgccactgcactccaacatgggcaacagagtgagactttgtctcaaaaataataataataataataataataataataataattaatttgccgtccaatatcacacaaaacgtcagtgatatagttaagatttgaacccagggagtttacgtttagagatcatgactatactgtgtcttggggctatagagtcctactcctgtttcattcggttccaatcacttctcatttaatcatgaccatttccttcatatcttcctcatagttctcattgtgagcttgaattatgattttcttcagatacaaccagaaagtggagagcagagtttgtaaaaccacgttttcatggggccaagcaggtcacatagatcattgtaaagccggccagatttgagaaaaatcagttgcagaaacatgatcaaaaattgttattttattaatatgtggattatgcctctatcataacacaaacatatatgctattggagatgatatttcaaacttgatattgaacaaagtctaattaaaaaataatcactatatatttgtagtttgtcattctttcattgggaacaaaatgtttttcttctgcactttgatgccaatatgaagtcctttgtttcttcacagattggtagagaactgaggcttgtgtccactaagtaggagggatatttagatctcttttgtttaataatagatgagttgttgaatgcactgtgaacatggatcaaatctttgcaataacattgttatatttatttatttttttatttatatattatatatatatttatactttaagttctagggtacatgtgcacaatgtgcaggtttgttacatatgtatacatgtgccatgttggtgtgctgcacccattaactcgtcatttacattaggtgtatctcctaatgctatccctccccccaccccacaacaggcgccggtgtgtgatgttccccttcctgtgtccatgtgttctcattgttcaattcccacctatgagtgacaacatgcggtgtttggttttttgtctttgtgatagtttgctgagaatgatggttatatttaatttaaatattacaagtttaaaattttatattatacatttctttttttttgagaaggagtttcgctctttgttgcccaggctggggtgcagtggcgtgatcttggctcactgcaacttctgcctcccgggttcaagggattctcctgcctcagcctcctgaatagctgggattacaggcacccgccaccacgcccatctaatttttgtatttttagtagggacagggtttcaccatgttggccaggctggtctcaaactcctgacctcaggtgatccacctgcctcagcctcccaaagtgccgggattacaggtgtgagccactgtgcctggcctacttacacattttcatacagataggttaatgtaacatgtttgaaatgttattctgattctttatactggcaactgaatgaactttgaatgctacatatggaaatatttttatttttgtaaaaatttataataaaaacaagaaatattccttatttaatttcagtaaaaattttatattaattttattctgctttcaatacataatttttgccaatttagaaaaagcatttgaaaaataattttaggtttgcaattttttccatttacttttatattttaaatgaaattacataaacataattatatttagctttttaatgtttaatctttaaaaaatttcattgtgtaacttttaaaaaaaatttaagtcctgggatacatgtgcagaacctgcagatttgttacataagtatacatgtgctatggtggtttgctccacctatcaacccatcatctaggttttaattattagtattatttcctggagaagctttacagtatgattcaatcctgtttgtctatttttgcttttgttgcctgtgccttagaggacatattaaaaaaatcattgcccagacgaaaataatggagattttcccctatgttttcttctagtagttttacagttttaggtcttatattgaagactttaatcaattttgtgttgatttttgtttatagttaaactaagggtcgaatttcattcttctgcatgttagatacccagtttcctcagcatcatttattgaatagaccatcttttcccatagtgtgttcttgacaccattgtaaaaaatcagttagccataaatgtatgagtttatatctgcactttctatcctgttccattggttgatgtgctcatttttatgcctgtaccatgctgttctgataattgttttattatatattttgaaatcagagagtgtgatgcctccaagctttgttctttttgctcaatattgttttggttatttggggtcttttgtagttccatatgaattttagaattattttctattgtgaaaaatgacattgtagttttgataaggattgcatgaaatctgtagatcaatttgggcatttcataataattctaatccaagaacacagaatatctatttatttgtgttttcttcaatttcattcaacagtatctagtagttttcgtcatacaggtctttagttaaatttatgcctaaatattttatttatttttgttgcttttattttgtttatatctgttgtaaatcagatcactttcttaatttcattgtcatattattattcgtgtatggaaacattactgatttttgtatgttaattttgaatcctgcaagtttattgaatttctttatcagttataatagttttctggtggagtctttagggtcatctatatataagatcacgttgtcagcaaatagaaacaattttacttcttttcatattaggatgccttttctttctttctcttgcctaattgctctggatagaatttccagtactgcgttgaaaagaagtgttgagggtgggcatccttgttttgtccctgatcttagaggaaaagctttcaacttttcactgttgaatatgatgttagctgtgggtttgacacagacagtcatccctcagtttacttggggaattgattccacgaccccctgcacatccccaaacctatggatgctcaagtcctgcagtttgtctgtggaacctgtggatacaaaaagccagccctttttatttgtgggttccatatcccacagatactgtatttttgacccatggttggttgaatccatgaatatggaatctgcaaatatggaggggtgattatcgcttctattgtgttgaggtacattccctctatacctaaagttttgagaagttttttttttaaccacaaaagggtgttgagttttgtcaaatgacttttcttaagattatatggtttttgaccctcattctgttaatgcttatctcacttattgatttgcatatgttgagccatccttgctactcaggggtaaatcctacttgatcaaggtgaatagttttttaatgtgttgtttaatttggtttactggtattaggttgagaatttttgaatctacgttcatctgagatattggcttgtattttcttttcttgtattgtccttgtctggttttggagcagggtaatgctggcttggtaaaataagttttaaagcattgcctccactttgattttttggaagagtttgagaaggattggtattagttcttgaaatgtttggtagaattcagtggtgtcgccatcgagtcctgggcttctttttgatgggagactttttattactgactcaatctccttacttgttattggtcttgttcagaatttgtttcttcatgatacattattcagtcttggtaggttgtgtgtgtctagaaatttgtccacttctagattatccattttgtttgtgtataatttttcatactagtttcttatgatcctttgtatttctgtggtatcatttgtaatgtctccactttcatttctcattttatttgagtcttctttcttttttcctagttagtctaggaaacgctttgttggctttgtttactcagtaaaacaacttttagtttcattgtttttcattgtttctcgtctctattttatttctgctctgatctttatttcctctctttggctaacttgagcttagtctgctagattatttgagttttgttaattgatataaacatttgttactatacaattcctgcttatacgatgcagaaaagtactcataagtttttgtatgttgtagtctcattttcatttgtctctatttcctttttgacttcttcagtgacccattggttttttaggagtatgttattcagtttctacatatttgtgaattttttaggatttctcctgttactgatttctggtttcatactattgtgatcagaaaagatacctgattgacttcaatagtcttaattttgttaagacttttttgtagtctaacatacaagataatctatcttggagaatggtctgtgtgcacttgagaagtacatggattccgtcgatgttggattaaatgttctgtacatgtttgttaggtgcatttggtttaaagtgtaattaaagtccagtgtttccttattgattttctttctagatgatcttttacattttcatagcaatttggcaaattaaggaaattaaagaaaattagctttaaaactatctgtaattattgctggatatatttttaaagaaggtaggctaggagagtaaatcacacaaaaatatgcttataaaaatcatatttatatattcaaaaatttgatttaatccataaacttgacagtagagtaatctttgatcaaactatggtgtaagagtgtctaggcatggtggctcacgcctataatcccggcactttgggaggccaagacaggtgtataacctgaggtcaagagtaccaagaccagcctgtccaacatggtgaaaccccatctctactaaaaatacaacaacaacaaaaatttagccgggcgtcatggtgtgcacttatagtatcagctattcgggaggctgagacatgagaattgcttgaacccaggaggtggaggttgcagtgagccagcatcatgccaccgcaccccagcctgggtgacagagtgagactgtctcaaaaaaaaaaaaagtatataggcacacctcaaatactatatgacaaacatgtaaactgtgttgttacatggacattcttgtacaaaaaatacatataaaagagtaacaaataatttaagttaaaaaggtagaactaaaagtatggatgcatgttaatttaaacagtgaaaggtgcatgtctgtcaatgaattaggagagaatatgggatgatgtaaaaacttttgtattttaaattaagtaggcagagttttactgttaagtacctagtatgcattatttgaaaggtaggttgcaatctttcttgcaaatgaatctctgtaggtaggtaattcctcattaaatgccacaatgtccccaaaagtgtaatttcagcagtgtcccttcccggttcacagtgcgggcaataagtcattccttattcgcagttccgaggagtggattcactttatctgccactgctcagctttcattttaagaagggctaatgcaggacagttctctgggtggccttgaatgaaccaggtttcccccttttcttgcttatagttttccagaataactgtagaatgtgacatcctgagatagggaagagctggatgcaacagcccaggttctgatccacttgccctagaaataggatgttatagaaaaccaaacaccacatgttctcactcataagtggaagttgaacaatgagaacacattggcacagggaggggaacatcacacaccgggacttgtcgtgggggatagggggcaaggggagggagagcattaggacaaatacctaatgcatgcgggggttaaaacctagatgacaggttgataggtgcagcaaaccaccatggcacgtgtgtacctatgtaacaaacctgcacgtcctgcacttgtatcccagaacttaaagcaaaagcaaaaaaaaaaaaataataaaaaaataaaaaagaaatgttcttcagccgtttagccaagtggatcctgtgacccccagggtgtaaggcccaaggtgggctgccttatagggtctctcagctgtagtgtaagtggagtacctgcatgtgagactcattccccctgtgcagcttttctgagccttgggggaccagctcgaggtgaatcctaggcgtctgttgttccttgctgcctatctgtgaataataaacgtgcttgatgtcacttgttgtctgtgtgggtgttctgtttcactcgactcggacaagttggtaaccggtgcacagtgaacctgcttcagagcttctacctcaatggctgacaccgattgaaaatacactacgtactaggagttaaccctgtatgtgtatttatgcacatttcatttaattatcacagagaatgctttacatatattatcatatttaaacttacaacacaatgaggtaggctttttcttttttttttttttttccaaacattaaataatttcctaggatcacacagcttaaacgtggcaaagccggggtttgaacttgattccacagcgtccacgctgcttaccactttgctctactaccttttattatcagacgatcgtgtctgggcttcagataaggtgaatagggagctggtgagctagaattgctattatctacagcaattaccatctatggcacagcagcctgcagtcagatacctgaaggtaaacagacaacaagaatgaaaaacagcacccagttgtgacattttattttcctatagaaacgtattggttgtggctgtaacgtactgtacagagtcttgccacaacgtctactgacaaagctttccaagtcgtttttggcaaccatgcacaataatcaatgtattctgaaaccgttggcctgagttgaccttgggagaaatacggaagagtgtggttaactgtggacatcagttatgaactggtggcactgggctcgcatgctacggtaaacagctggaagttgattctgcaggcagtttcaagccactggacatttctcttagtgatataatggtaccctatgaagattaatctgattatggtgtacagagttgatggaaggcgggtagactgaggactgaagaccaactaggaggaggctttaatcattcaggcaggagagcataaagtgtccataaaaatcattcttttcccctaactttaagttgtaaccatttcagtgggattcagcacctatcaatggtaccaggcattacgccatgtggtaagcattggggctgcagagatgaaatgagtgtggaaaaaattgccctgaagaggaacctgaggttttcacatgaagtctaaggtggcaggaggattatgggtcttggaggcctggtaagacactgcagtgagtctgtctgaagatgccatctccatcaagcccttcctagacccagttcctcatcactgagcatgggagcatcacagatacgggcagtgcctgtggcagaaacactgtgggtggggatccgagtgatcaggatcacagtgatgctgggggaaggtcgtccttccctgaattttattcttggccctatacaacagcccagccagatattcccttatttcagtcatgagctgtcccatgttgtttaaaaagcattaactaataacattattaaatcatcaatattattaactatagtaaatataataaggcatgacattatattatacatctggatggctgtggttttagaacataattgtaagaacttcacctgtgacattggcctgatgatgggttatgatgcagtcctgtagcttagacatgaatatttcaggttcagatcgtaggtactggaacagaggtctctagattctctccatctttcattcttcactgcttactgtggtgaacgcaggtgcatggagacccccatattggatgtcaagtcactaccactaaggggaatgaattttccgaacccagattaactttctcagggaagactttatttcttggttcctcaaactgtagataaagggattcaacattggagttaccactgtgtacatcactgatgcaactgtgtccttctgggccgagtgggttgagggagaactgaaatcaacacaaaaagaagtcccaaagaagagagagaccacggagagatgagagctgcaggtggaaaaggctttccgcttcccctgagctgatgggatcttcaggatggtcgagaaaacgttcgtgtaagagataatcaggcaaagcacacaaatgagtcctgtgagacccccagtgatgaagatcaccagctcattggtgaaggggtctgtgcaggacagactcaggaggggattgatgtcacagaagaagtgtgggatctcatggtttgcgcagaaggacaggctgttcatcagaagtgtgtgtagaagggagtggagggcattcatgatccaggatgcagacacgaggaagatgcagagcccagggctcatgatcagaatgtaatgaagtgggtggcatatggccacgtagcagtcataggccatgaccgccaagaggaatgcctccagcatcacaaataacatgaaaaaatacaactgtagtagacaccctgagtaggagatggcctgactctggatctgtatgtttgccagcatcttagggactgtggtggacacaaagcaggcatctgcaagggagaggttggctagaaagaagtacatgggggtatggagttgagtgtcagtaatgatgactagaatgatgaggaggttgcctgccaccgtgaccaagtacatgaacaggaaggacccaaagaggggcttctgctcctccagctgctcagagaaccccaggaggaaacattctgagatgctggtcagatttttcccctccatttgtctgtaggaagaaagttgggttaattgggtgacgttggtaagccctggattgtgaactctgaaaattatgcaatattccagtgttgatcttctagtgtgaggttggatcataggaaatctccactatttgactctttgggacctgcaaaaatggccatttcatagggttcgactaaatatttgcaaattcctgtgcttggtgctatgagaaaccacagatttgtttgtaatgcaatgagaggcttttaaatttattccataagcattaagccaatatgtgtattttggggctgggctggaggggcttgctggctttgctctggtagtgttcatgtagaaactatgacatttatacaacccaagattttacaggtcaaatgagcccattgtaccaataattaaaaagacagctcctggaaaggggttttggaattgggaaaagcatggctaacatggaaatcattatcactgttatctacacagcgggtctggccagaaacctgagcgtcattattgacccacgtttctccctccctgcctacatccaaccaccaccaaagcctggcaattttaccttctcaatatggctacaatttactgacgtctctctgtttactggtcaccatcagtcccagctgcagctcatgtcattcagggcactgtgatttctcacttggatttgggcagttgatctccatgcccccaggtatgcccacctgccacctgctgttctaaatacacagagaataggcttgctaaaaatcaaattcgactcttgtctttctgcttgaaaaatccttcatacactcctcattactcccaggataaactctaaactgaacacggctgaatgtcctggatcttaccgtcatttattacagacatccccagttcctcatgaaactccctcctccactccacactttatgcactaatcatagtttcaattattttaaaggcccagatactccctcacctttaggctttctcaggctgaaatagtttttcccatcccatttatcagacgagctaagcttcaggtctcaccttagatgtcacctcttctgggaagtctttcccaactcatcctctcaccagaaactcaggttcgtgaccttcctaatgcagtgcctcccccatcacagcacgtgtcaccttggattctgagtgtctgtttatatgagtgtccctcattctgctgtgagcatcactgggagtaggcagagatggtgcctaattggctcagctttgaaatctagcattagccttgaggctggtacaacacagatgctcagtatgaatctatcatgtaaatacataaaccccagagaatggaaagagtgggaagaatggaaaggggctttgctatagaggtaatatcaggcataagaattagcctgaacctttattattattgttatgatttttgagatggagtctcactctgtcacccaggctggagtgcagtagcacgaactcagctcactgcagtctccacctgctgggctcaagtgattcccttgtctcagcctcctgagtagctgggattacaggccactgctaccacacctggctattttttttttttttttttttgtatttttagtagagatggggtttcatcacattggccaggctggacttgaactcctgacctcaggtgacccacctgcctcggcctcccaaagtgctgggattacaggcatgagccaccacacccagccaacctttttgttagtaggttcagtggtagctttgagttaatggagtcctggccataggaatatgtagggaaacactacggttacagagagataagtgttccaaacaaatgcattctttctaggtgaaattcttgggatggaacagtgtttcagctgagtgattaacccacggaatcagtttccctgtgccgcttttttttaccttcagagtttaatataacctatggatttgtaagccttagttacgtacactaaaattactacttactaggcaatagtggcatcttatgtcttattctctctctgaccatggatatttcttatttatttatttttgagacggagtctcactctgtcacccaggctggagtgccgtggcagaatcttggctcactgcaacctctgcctcctgggttcaagcaattctgctgcttcagcctcccaagtagctgggactacaggcacacgccaccacacccggctattttttttttttttgtatttttagtaaagatggggtttctcctcattggccaggctagtttcaaactcctgacctcaggtgatctgcccaccttggcctcccaaagtgctgggattacaggcgtgagtcaccgtgcctggcctgaacatggctatgtcttaccgaactatcttctgctagtatgtggatgccccagggactgtggtatatgttacttctctcctcaatacaattcatcaaaggaaaaaacagaaaacccagaagcagagcacagtattcctcagactttgctttactaacagtggcactgccaatcaaaaggaagaagagattgaacgaacaatgctgggacaagctggttaagtctctggaaaattaatttaaattccaacctaatagcacttacctgaataagtttcagatggttaaagcattttccctgcagatgtaactctaaagcaaccaggagaaaatgcagcacaatatttactctcaggacaagggtggactttctaagtaaaaaacagtgaagaaaacaagaaaggaaaggaataattggtttgatcaaattaaattaaaaatacaccatggaatactatgcagccataaaaatgatgagttcatgtcctttgtagggacatggatgaaattggaaatcatcattctcagtaaactattgcaaggacaaaaaaccaaacaccgcatgttctcactcatagatgggaattgaacaatgagaacacatggacacaggaaggggaacatcacactctggggactgttgtggggtggggggaggggggagggaatagcattgacgagttaatgggtgcaggacaccaacatggcacatgtatacatatgtaacaaacctgcatgttgtgcacatgtaccctaaaacttaaagtataataataataataaaattcttttaaagaaaaagatcacatgcaaagtaaaaaaacaaagtaggaaggtactttttgcatttattaaggaaataattaatattcttaaaagtgttatgttccattaatgagaaaagggtatctttccttcattcatagaaaaacgaagaatcccttgagccttaagtcacatccagcaagtggcagagcctggatgcagcctccactgtttaatcccaagcttcttgttcttctcacctgcccacgtggtcttctttaatcattttatctgccagccgctgaaatctccaaggtctcccccttgcgtgttcttggccaaaatgtggtcatagtaggtgatgtttcccttactccctaccaagagtccccattaccactcaaggcatgtgtttattagcctctgccttcctcatcctcccaagacagagctctaggtgaagtgggtggattcgtggggctcagtgcattttttttttttttaagacagagtctcactctgtcatccaggctggcatgcagtggcgcaatctcacctttttaatctgcctaagtcaatgaaaggctctgcctcctgggttcaagcgattctcctgccccagcctcccgagtagctgggattccaggcacatgacaccacacttggctaatttttctatttttagtagagatggggttttgccacgctggccaggctggtctcgaactcctggactcaaatgatccaactgcctcggcctcccaaattgctgggattacaagcgtgaggcaccgtgccagcctcagtgcatatttacaggtgcatctacaaggctctcccgacgccctggtgagcacgatcacccctgcagctccctcactttaacagctgttgctttttgtggtgcctggaattgattctcacctctccctcatgtaggacaagcctttcattgacttacgcagattaaaaaggccttagaatcctcaccctccttcatcgtggggctcttggctgtttctagtttagcagagatggaaacctcagcccgtttcccctccattttttctcttggtccccaagtcactgaccagagatcttatttccttccttctccttttagacctttaggtctcaacttttagacaaccacgtgcccagtgaatggccagcccttcgtccacatagaaaaccctttccatgcatcgtccttctttcttttcacgtggagtcagcaggcattttcttaggcttattaggaaccctaactccaacaactcaaaataaaatcgttcttatattctatattagctatgtgctgttttagaagacattttgtctgtggtagatggattacaatttttggtgaacttagtttggatgccttaggacccaggttcaagtttgaaggtggaaataaagtgtagagaacttatgctccccactgatgaagaaagaaacatgcaaggaggaaagaagtgaaagttataaggttaaaaacaaaccagagggaataaggatgtggtgggggaccggagtgatcaggacacaactcaagtccctattcttattttggtcacaaataacactttaactccaccttccaaaataacatgcaatatattgtctagtatgttcattaaaactttctggaagaattaaacaggaaaccagtaacagcgattacttgttacaggcacagaactgggtagatgaaaggcaggaggggagaaagatgttcatatctacctttcagcactttttgaagtctgactatgagaatgtactacttactgaaaaataaattacttaagaaaatcttaccccaaaggcaagccacaagctcataaaatgtataaaatggaagaaaatgcagtcgaatgcagcttctctttgacgaagattccacaaatagcagaggaaccgtatggctgaaggctcatccttctaaggcgtcagtgttctgtgtgggcaagagtgtgcatatggtgtggacatcggggtgtgactgcatccgtgtctcctgcagagaaagggctcatcaggggattgtttggacagaggtctctgttgcttcctgctctcccatttcacaatcactctgattgtctgtaaggtcctgaggatctgggtctttggcctttttggctatgaaagcagcatcatgtcattgttatggttacagggctgattttgagagacgggctctcaatgcaccaaaggctggaatgggccggagaagggacaagaaaaaagaagccaggccgggcgcggtgcctcacgcctggaatcccagcactttgggaggccgaagcaggcggatcacgaggtcaggagatcgagaccagcctggccaacatggtgaaaccccatctctactaaaaatacaaaaattagctgggcgtggtggcgggtgcctgtaattccagctacttgggaggctgaggcaggagaatcgcttgaacctggaaggcggaggttgtagtgagccgagatcgtgccattgcactccagcctgggcaataagagtgagactccatctcaaaaaaaaaaaaaaaaaaaaaaagaagctcctctagtcctcacccgatcgttctcgccagttcccaggctgtcactgtcagaattctccctgcttcacctgcatctctccccctgaagacggggacaggaacgtgacaaaaactccttttaaaggcaccaaaaggaaaaccgcttcagactcggggtgagttgaatgatgactcttgacgtcactacctctccttcaattcctccttttgtctcacaggattagagaacctcttatctttgtccattctgagagtaagggacaaaagctccaggtcaagatcaggatcatgccagcacatgtatcttgggaagctgcattcacagaaccccacacagagcctgataatcacatcctgccccttttctacttacttaaaatttgctctaatgtctgttcactttccttattcacggagaccatgagaaatgagtccttataatttcatcagcacctggaattagggtcctgctatatttagtgacaggttgggtcaatttcaaaacatgttaaattggaggtaattaattctgggagatgccccaaacccaaggggattaggaatccagcgctggatccctgtggtgatcgggtccaagagaggataaggcactgggaaccggcccacgacacctctggagtctcagaagaattttggtattccaagttcacaagcaaagagtggatttttgttttctggagctttccagggtagttcagatagaggcctgtaggaccatgaaaagggccagatggtgtaaactattgttggctccaaagtcatatgaatgattttagctattatgtttatttaaaaattctggaagaataaacaggaaaccaataacaatgattacttgttagaggtatggaattggatgagagacaggagagaaaaacgatttccatgtgtaccttttagcacattttggagtttgaatatgtgaatgtactccttattgaaaaataaattaattaggaagtcttaccccaaaagcaaaccatgggctcataaaatgtataaaacagaagaaaatgcagtataatgcagcttctctttgatgaagattccataaacagcagagacacttgtatgtttggagccacatccttctaatgtcttaatgctgtgtgtgagcaagagtgtgtacgcgcctgtgttagtgcaggaagatacgcttatgccatcttttcttcttccagacgtgagaacccgagaagcaaggcttagactatgttggtgcaggctcacttgccctatttttatcttctctggactggagagagcagagataagaatctgaacatccctaaacatggcaggtgccagaaacctgaacaccattctggcagatgtggcatcaacagctccatgcggcaggtggaaagtgaaatgacacccagaaaatggagtctctgttttctcctgtagaaatggccccatgagtctccctaacccagttgatctatccagggaatctggagaataaagaagcatagaatttggataacttgggcatatgggttattcttgatatctctttgggacagtggccaatgtcttgtatgttctaggggtataattatgatatacctttaaatcagcagtataatagtttaaatatattattccattggattgaacaaaagaacaaccacctaattttatgcttaaaaaaatctagtttattttttttctacctttggtaaaaggaagggaataagctgcttgtttaagaagaaagtagaaatacatgaaatccatattctgtcttccagacacatgacatggcttagctgtggtatttgatgttcaatccattcatcaaagtggaatgcttactggtgcagctgaatgaacaaaagttgggaagagagcaatgcaggtcttggagttggaaaagtcatctgtgttagtccttcttcctatttcacttcttttcttaaaacctggagaggtagaacataaagggagcccaaatccaactcatgtgttcttagtttgaccagatgagcatttgcaaggacccccttttatcttttagagaatgaagaagatctagtatttgatagcacaataccatcactatagtcaattcaatcatacattaaaaataactaagtataattggattgtttgtaacacagcggataaatacttgaggtgatggatacaccacttaccctgatgtgattattacacactgtatgcctgtatcaaaatatctcatgtaccccataaatatacacacctatgtacccacaacattttgaaaaatgtaaacaataatgaaaaattatgacattgatttggttgctttgtaatgtagatagatgttatatatatagcatctagcaaaaggcattggagcaataaatgagattatgcaaatacagagcttctacattttacatgaggtggtgtgatattaactgtaaatggactgtgagaagccaagcatgtatatcgaaatcctacaaccacgaatgaaaacataagataaaggggaataacttaaaaagtaataaataaataggaattacaaaagggaccattaccatggctggagtgtcccctctgcttgttaaagttctagccatgtttcctgcatgtgcacacatcctgacttctttagatatctctctttattattctatattccctctacaggccagctgtggaggcagaggaagagcattcagcatgaggaaaactaggctcaaatacaagatctgcatttttctaattgaaagacatgggctaaatcacttcatctttgagagatgtgacttcatctggaaagagggctattgccatctgtgccacaggactattttgaaaattcaaagagacaataatatatgtgatagacgaaatgcacacacccacatgcatacatacatttcatatgtaatgaaatggctactttctctgaacctacgtggcacattaacttcttttgcagcacttatcactttctttcttgtttcatttttttcaaaaacaagtatttgagtgctcagtagtgcaggacaatacactgtgctatgtcccttgactgatataaaagggagagagacacatagtttgacttggagggacatcaagtcttgactgtacaaatatcttccttccccaactagaatcctcattctccagcctggctccctttcttgtagtcattctgcaagcctctttgttgaaaacttgacttctcagctcccctctgatccatgttctgttaattttgctccaaagctttgtgtcttcattctactatttaattcaatacatccgcaagagtcacaggaacactaaaaacacacccaaaatggaactatttttttcttaaattactcttttgttcactactgtcattaagggcatctttttccttttagtgactcaaactcaaaatcttgtagacatcttattgctatcataataattcattctgtggtttctatttccacataacctttgcatctagatcgtagatgcaaaggagcatacctccttatatagtatctatcctctttggtatttattatttcactatgggcaataaacacctaatttcatttgatgttactgagtttatccataacagcaaaattagtcttgtattcattttgtatcttcactctctcttccctagattgctttaagagctgtctaattaaactcctgatctcatcactctcccctcctcccttactgctctcttatctatccattcttgattaaagagaagctctcttcattgtttcattcagagcttttatctatgtatctatgtaactatcaatcataatttcataaacacccctggactcaccacttaatctgaatattaggactgtagtaataacctacatctaactatgtgataaccctagttctattcctccatctctcctcttgaattttgtctcatcctcaaccctgtggtcattctctcctttgcttttgtttttattttatttttattattcattaatgactgtcttagcaagattttaggatttgtattatctttagatatagtctagtttaaactatgaagtaagcacaaaaatatttccccaggtcagtttctttttttattatactttaagttctggggtacatgtgcagaacatgcaggtttgttatgtaggtatacacgtgccatggtagtttgctgtacccatcaacccatcatctacattaggtatttctcctaatgctatccctccaatagccccccaccccctcacaggccccagtgtgtgatgttcccttccctgtgtccatgggttctcattgttcaactcccacttatgagtgagaacatgcagtgtttggttttctgttcctgtgttagtttgctgagaatgatggtttccagcttcatccatgtccctgcaaaggaaaggaactcataccttttttatggctgcatagtattccattgtgtatatgtgccacattttctttatccagtctatcgttgatgggcatttgggttggttccaagtctttgctattgtgaacagtgccacagtaaatatacgtgtgcatgtgtctttatagtagaatgatttataatcctttgggtatatacccagtaatgggattgctgggtcaaatggtatttccggttctagatccttgaggagtcgccacactgtcttccacaatggttgaactaatttacactcccaccaacagtgtaaaagcattcctatttctccacatcctctccagcatctgttgtttcctgactttttaatgatcgccattttaactggtgtgagacggtatcacattgtagttttgatttgcatttctctaatgaccattgatgatgaggtttttttcatatgtttgttggctgcataaatgtcttcttttgagaagtgtctgttcatatcctttgcccactttttgatggggttgtttttttcctgtaaatttaaattctttgtagattctggatattagccctttgtcaaatggatagattgcaaaaattttctcccattctgtaggttgcctgtttactctgatgatagtttcttttgctgtgcagaagctctttagattccacttgtcaattttggcttttgttgccattgcttttggtgttgtagtcatgaagtctttgcccatacctatgtcctggatgatattgcctaggtttccttctagggtttttatgggttgaggtcttatgtttaagtctaatccatcttgagttaattttttataaggtgtaaggaaggggtccagtttcatttttctgcatatggctagccagttttcccaacaccatttattaaatagggaatcctttccccattgcttgtttgtgtcaggtttgtcaaagatcagatggttgtagatgtgtggtgttatttctgaggtctctgttctgttccattgggctatgtgtctgttttggtaccagtaccatgctaccatgctgttttggttattgtagccttgtagtatagtttgaagtcaagtagcatgatgcgtccagcttttttttttttttttttttttttttttttttttttgcttaggattgtcttggctatacgggctcttctgttggttccatatgaaattttaaagaagtgttttctaattctgtgaagaatgtcaatagcagtttgatggaaatagcattgaatctataaattactttgggcagtatgtccattttcatgttattgattcttcctataaatgaggatggaatgtttttccattttttgtgtcctctcttatttccctgaacagtggttcttagtttcccttgaagaggtccttcacgtcccttgtaagctgtattcctaggtattttattctctttgtagcaattgtgaatgggaactcattcatgatttggctcttggcttgtctattgttggtgtatagaaatgcctgtgatttttgcacattgattttgtatcttgagattttgctgaagctgcttatcagcttaaggagtttttgggctgagactatggggttttctaaatatagaatcatgttgtctgcaaacagattctcttcctatttgaataccctttacttctttctcttgcctgattgccctggccagaacttccaatactgtgttgaataggagtggcgagagagggcatccttgtcttgtgccagttttcaaagggactgcttccagcttttgcccattcagtatgatgttggctatgggttgtcatagatggctcttattatattgagatatattccattaatatctagtttattgagagtttttaacatgatgcgatgtcgaattttatcgaagcccttttctgcatctattaagcatgtggtttttgtcattggttctgtttatctgatggattacatttattgatttgcatatgttgacccagacttgcatcccagggatgaagccgacttgattgtggtggataagctttttgatgtgctgctggattcagtttgccagtattttattgaggatttttgcatcagtgttcatcagggatgttggtctgaagttttctttttttgttgtgtctctgccaggttttagtatcaggatgatgctggcctcataaaatgagttagggaggagtccctccttttcaattgtttggaatagtttcagaaggaatggtagcaactcctctttgattcacagccgaattctaccagaggaacaatctggtggtcctgggcagttttgggttggtaggctattcgttactgcctcaatttcagtagttgttattggtctattcagggattctacttcttcctggtttagtcttgggagggtgtatgcattcacaaatttatccatttcttctagattttctagtttatttgtgtagaggtatttatagcattctttgatggtagtttgtatttctgggggagggggtgagtggtgatatcccttatatcatttatattttgtctatttgattcttctctctctttttctttatttgtctagctagtggtctatgtattttgttaactttttaaaaaaaaaaaaaaaccagctcctggattaactgattttttgaaagttttctcgtgtctctacctccttcagttccactctgatcttagttatttctggtcttctgctagcttttggattcgtttgctctttcttctctaattcttttaattgtgatgttagggtgttggtctgagatctttccggccttctgatgtgggcatttagtgctataaattgcccttttaacactgctttagctgtgtcccagagattctggtacattgtctctttgttttcattggtttcaaataacttcttaatttctgccttagttttgttatttacccaggagtcattcaggagcaggttgttcaatttctatgtagttgtgtggttctgagtgagtttcttaatcctcagttctaatttgattgcactgtggtctgacagactgttatgatttcatttcttttgcatttctgaggagggttttacttccaattatgtggtcgatgttagaaaaagtgccccgtggcactgagaagaaagtatattctgttgatttggggtggagagttccatagatgtctattcggtccacttgatccagggctgaattcaagtcctgaatatccttaattttctgtcttgattatctaatattgacagcggggtgttagactctcacacaataatagtgggagacttcaagtgtctttgaaggtctctaagaacctgttttatgaatctcagtgctcctgtattgggtgcatatatatttaggatcgttagctcttcttgttgcattcatccctttaccattatgtaatacccttctttgtcttttttgaagtttgttggtttaaagtctgttttgttagagactaggattgcaactcctgcttgttttgctttccatttgcttggtaaattttcctctatccctttttttttttttgagcttatatgtgtctttgcatgttagatgggtctcctgaatacagcacacgccgatgggttttgactctttacgcaatttgccactctgtgtcttttaattggggcatttagctcatttacatttaaagttaatattgttatgtgtgaatgtgatcctgtcatgatgctagctggttattttgcacactggttgatgcagtttcttcatagtgtcactggtccttatattttggtgtgtttttgcagtggctggtactggtttttcctttccatatttagtgcttccttcaggagctcttgttaatgcaggcctggtggtgacaaaatctctcagcatttgcttgtctgtaaaggattttatttctcctttgcttatgaagcttagtttggctggatatgaaattctgggttgaaaactctttattttaagaatgttgaatattggcccccactctatttgggcttaaggtttctgcagagagatccactgttagtctgatgggcttccctttgtaggtgacctgacttttcttgctggctgctgttaacatttttttccctcattttgaccttggagaatctgatgatagtgtgtcctggggttaatcttctcgtgaagtatcctatgatgttctctgtatttcctgaatttgaatgttggcctgtcttgctagcttggggaagttctcctggataataacctgaagtgtgttttccaacttgtttccattctccccatctctttcagatacttgtatcaatcgtaggttcaatctttttaaatagtcccacatttcttggacgttttgtttgttccttttcattctttttcctccaatcttgtctgcttatttcaagatagtcttcaagctcaaattcttttctctgcttggtctgtttggttattggtacttctggttacattgtgaagtcctcgtgttgttgatactgtgattgcattgtgaagtcctcccttgcctggagttgctgaaattcctgcagggagccaagccacgaggaggaatgtgtcagggtccagcctaaacaggcagtctggccatgatccaccacagccgctttactgcactgtaggaaattcatcctggatctaaactgtccagtttctctggcactggcagggtaaaaacagctgactggagctgtagtgatggctgccacccctcccctgggagctcagccttgtttttttttttttttttgagacagagtctcgtggtgtcacccaggctggagtgcagtggcatgatctcggctcactgcaacctccgcctcctggattcagatgattctcctgcctcagcctcctgagtagctgggattacaggcacccactatcctgcccagctaatttttttttttgtattttggtagagacagaatttcaccatgttggccaggctggtctcgaactcctgacctctggtgatctgcctgccttggcctcccaaagtgctgggattacaggcgtgagccaccacactggcagggagctcagtcctcttaggcagccaccagctgcagtgatgatggcagtccctcctcccaccggaattcagtaggcttaagcaatctccagctgagtggccgctgagagtctgcacagctctgtgcttgggacccaaggacctggtggcatgggcttccgaaggggatctcctgatctgtgggttgcacgcatccggggaaaaactgtggttccctggccagggtagcaccatcactcgccacctcccttggctgggggtgggagctccccttgccctgtgtggctcccaggtgggccatcgcatcaccctgcttttcctcactgttcatgggtcacgccaaccacctaatcagtcccagtgagagaacctggatacctcagctgccattttcattcttctcagaggaagcctctgactgcagctgtttctagtcagccatcttggccctctcctctatattttcttatacattttagaataatcttgtttatatataaaacaaaaaaaatcctgctggaattcggataggaatttaaacctaaatctcaatttgaggagaattggcaactttgctatgttaaatttcacaattcatgaacgtgttctgtctctccatttatctaggtcttcttgatttctttcagcagtgttttgtagttttcaacataaaaatcctgtacatgtcaaaaattagctgggtgtggtggtgcgcacctgtagttccagctacttgggaggctgaggcaggagaatcgcttgaacccgggggggcagaggttgcagtgagccaagatcccgccattgcactccagcctggtgacagagtgagactctgtttttttttttttttttttttttttgagacaaacaaaaaaaactagtcctgtacatgtgtttttgttttcagatttacatctgttttattttcctgagtgattgtaaatgcttttgtatttttaagtttggtgtctgcatgcttattgctactgtaagatatacagctgatttttgtacgtttatcatgcattttgtgacctttctgaactcacataagcattttttaggttttgtttttgttttgttttagctttttaaagacatttcttagaattttctatgtcctctgaatcatgtcatctgaaaatggtgacaatttcatttatttctgtttgtatgccttttatttccttatcttattgcactggatataacttccagttctttattcaataagagtaatgacagtcaacatttttgatttgtccccagtctttcctcataacctacagtataatgttagccataggattttgtagatgctttttatcaagttgagcaaattcctcttcattcttctccttctcaggttttatttttaaaaatttatgaaagaatgttaaatgttgtcaaatctgtttactgtatcaattagtgggatcatgtaattctttaggccgttagtatgctagattggattgactggctttcaactattgaaccaaccatgcatacctggaataaaccccacttgatcatggtgtataatttcttttatatattgctgaattttatctgatattatgaatttttacatttatattcataagggtattggtctgtagttctctatgtctgtactctctatctggttttggcatcagggtaatctcttctctccttttctatttttggaagagattgtgtagaatttgtgttaattcctctttaaacatttgatggagttttccagtgaaaccatctggacctatatatttcttttgaggccttatacaattattatttcaattaccttaatagctgtaagtctactcaaatgatctatttcacattggatgagttgtggtagtttgtatttgttgaggaattcgttcattttatcttcattgtcaaaattatgtgtgtagaattcctaatagtatcctcttatctcttgtatgtctgcagggtctgtagtgatataccttatttcagttcttatattgtcttctctgttttttctttgtcttgctagagatttgttattgatctttacaaagaaccgggtcttcgcttctttgatttttctctgttgttttttatgttcaatttcattgatttttgatcctatcattattacttccttccttgtgtttgctttgaatttattttgctcttttctaggcttcttaaatgggaacttagattattgatttgagactttcctcttttctaatgtatgtattcagtgctatacattttcttcttatcattgttctagctttgttccacaaattctgatatgttatattttcattttaattcagctcaaggttgttttttaaaattacacttgcaacttccccagggattattaataaatgtgttgtttagtttttgagtgtctggagattttcctaatctttgttattgatttctaggctgatttgttaagtttatcttataccccagtatatgatctatcatggtatatattcgggagcacttgaaaataatgttagttctgctgttattgaagggggtggtctataaatgtcaaatagatactgttggttactgctgttgtagagttatcccatatccttactgagcttctgtctagttattctatcattgttgagagaggggttttgaagtcttcaagtataatcgtgaacatttgtctatgtctccttcagttttcagtttttttctcacatattttgcatttcaattgtatgatgaatacgttttcaggattgctatgtcttcctggtggattgagccctttattataatatccctctctgtcactgataatttcctttactctgaaatccacttatatgaaatatatatagccacgtctctttcttttcattaatgtttatatgtctttctccattcttttcctttcaacctaagctgtaatatttgaggtgagtttcttgtggacaacatagagttgggtaatgtttattttgaatctaccctgccaacttctgtcttttaattggtgcatttagaccatttacatgtaatataattaatgctttctttttcctgccttcttgtgagttgctttaacatttggtgtttttgagtatatccctttgtatagttttttagtggctgctgtaggcattacactaaacacacatacataatttatcacattttactgttttcatcattttaccagttcaagtgaagtgtggaaaccttacctccctttaattaatccactaaaataaaaccaactgcccccgaccatttcgtgctcctcatgcagtagaccaacagaaaaagatacgagacacttttttttaactgataattgatattgattaccatgaagatttatggctgctactacacaattgaaaataatacatcttaaacttaaggggtttacttcgatatgccatgaactttcatattaattccataaatagtaataaatgctaacaagaattttagtcatcataacacaaaaaaagcagaataactaaaacctctgattgttgaaggtctaattcattctaccaggcatcaacacagacctgccaactgatagcttagatgagggaaatctaaaatacgtagtagagaattgagctaattatctgcagttacagctttgggacaatcaacagtagtatgaactgtatcttgttttgattacacttttatgaaatctttccaactcctaactggccaccaccttaaagggaattctgagttatggggcatatacccaccctatttgggaaggaatcaggctgaattcattttaacaacacttagaggctccgtatcataggatgagagctggatacaatggggaactgcaaatggatctgagtagcacaggcgtggattgcattgaacacaaacgtcatgcacctcctcagtttctcttgacgatctccttctttctgaaggcatcccctgcctcctggaccaagtcactaccactgacagccttacccctcttgtgggagatggggtgtgctactcagcacaaggaagcaaagttatgtgtggtccaccactctttgtcaaattcctcaagatggctggaatcccagtttttgacccagacctgcatgggctataggcagatacacacacacaacactcacagtcagccacgacttaaggaagaaagctagaaataaatacacatggctgggcgtggcagctcacacctataatcccagcactttgggaggccgaggtggatggatcactggaggtcagcagttcgagaccagtctggccaacatggtgaaaccccgtctctactaaaaatataaaaattagccaggcgtggtggcaggcacctataatctcagctacttgggaggctgaggcaggagaatcgcttgaacctggaaggcagaggttgcagtgagccgagatcgtgccattgcactccagcctgggcaataagagtgagactccatctcaaaaaaaaaaaaaaaaaaaaaaagaaaataaaaagaactacacactagttaccataatatataacttacatttatttatcttctcattacaaattgtttgtaaatctttttactaagagaacacagatcactcctatattgctgagagctttgtttttttttattattatttatttttttttaattatactttaagttttagggtacatgtgcacattgtgcaggttagttacatatgtatacatgtgccatgctggtgcactgcacccactaactcgtcatctagcattaggtatatctcccaatgctatccctcccccctccccccaccccaccacagtccccagagtgtgatattccccttcctgtgtccatgtgatctcattgttcaattcccacctatgagtgagaatatgcggtgtttggttttttgttcttgcgatagtttactgagaatgatgatttccaatttcatccatgtccctacaaaggacatgaactcatcattttctatggctgcatagtattccatggtgtatatgtgccacattttcttaatccagtctatcattgttggacatttgggttggttccaagtctttgctatcgtgaataatgccgcaataaacatacgtgtgcatgtgtctttatagcagcatgatttatagtcctttgggtatatacccagtaatgggatggctgggtcaaatgctatttccagttctagatccctgaggaatcgccacactgacttccacaatggttgaactagtttacagtcccaccaacagtgtaaaagtgttcctgtttctccacatcctctccagcacctgttgtttcctgactttttaatgatcgccattctaactggtgtgagatggtatctcattgtggttttgatttgcatttctctgatggccagtgatgatgagcattttttcatgtgttttttggctgcataaatgtcttcttttgagaagtgtctgttcatgtccttcgcccactttttgatggggttgtttgtttttttcttgtaaattagtttgagttcattgtagattctggatattagccctttgtcagatgagtaggttgcgaaaattttctcccattttgtaggttgcctgttcactctgatggtagtttcttttgctgtgcagaagctctttagtttaattagatcccatttgtcaattttgtcttttgttgccattgcttttggtgttttaggcatgaagtccatgcccatgcctatgacctgaatggtaatgcctaggttttcttctagggtttttatggttttaggtctaacatttaagtctttaatccatcttgaattgatttttgtataaggtgtaaggaagggatccagtttcaactttctacatatggctagccagttttcctagcaccatttattaaatagggaatcctttccccattgcttgtttttctcaggtttgtcaaagatcagatagttgtagatatgcggtgttatttctgagggctctgttctgttccattgatctatatctctgttttggtaccagtaccatgctgttttggttactgtagccttgtagtatagtttgaagtcaggtagcgtgacgcctccagctttgttcttttggcttaggattgacttggcgatgcaggctcttttttggttccatatgaactttaaagtagttttttccaattctgtgaagaaaggcattggtagcttgatggggatggcattgaatctgtaaattaccttgggcagtatggccattttcacgatattgattcttcctacccatgagcatggaatgttcttccatttgtttgtatcctcttttatttccttgagcagtggtttgtagttctccttgaagaggtccttcacatcccttgtaagttggattcctaggtattttattctctttgaagcaattgtgaacgggagttcactcatgatttggctctctgtttgtctgttgctggtgtataagaatgtttgtgatttttgcacattgattttgtatcctgagactttgctgaagttgcttatcagcttaaggagattttgggctgagacaatggggttttctagatatacaatgatgttgtctgcaaacagggacaatttgacttcctcttttcctaattgaataccctttatttccttctcctgcctaattgccctggccagaacttccaacactatgttgaataggagtggtgagagagggcatccctgtcttgtgccagttttcaaagggaatgcttccagtttttacccattcagtatgatattgcctgtgggtttgtcacagatagctcttattattttgaaatatgtcccatcaatacctaatttattgagagtttttatcatgaagggttgttgaattttgtcaaaggccttttctgcatctattgagataatcatgtggtttttgtctttggttctgtttatatgctggattacatttattgatttgcgtatattgaaccagccttgcatcccagggatgaagcccacttgatcatggtggataagctttttgatgtgctgctggattcggtttgccagtattttattgaggatttttgcatcaatgttcatcaagcatattggtctaaaattctctttttttgttgtgtctctgcctggctttggtatcagaatgatgctggcctcataaaatgagttagggaggatgccctctttttctattgattggaatagtttcagaaggaatggtaccagttcctccctgtacctctggtagaattcagctgtgaatcaatccatctggtcctggactctttttggttggtaagctattgattattgccacaatttcagatcctgttatgggtctattcagagattcaacttcttcctggtttagtcttgggagagtgtatgtgttgaggaatttatccatttcttgtagattttctagtttatttgcgtagaggtgtttgtagtattctctgatggtagtttgtatttctgtgggattggtggtgatatcccctttagcattttttattgtgtctatttgattcttctctctttttttctttattagtcttgctagcagtctatcaattttgttgatcctttcaaaaaaccagctcctggattcattaattttttgaagggttttttgtgtctctatttccttcagttctgctctgattttagttatttcttgccttctgctagcttttgaatgtgtttgctcttgcttttctagttcttttaattgtgatgttagggtgtcaattttggatctttcctgctttctcttgtgggcatttagtgctataaatttccctctacacactgctttgaatgtgtcccagagattctggtatgttgtgtctttgttctcattggtttcaaagaacatctttatttctgccttcattttgttatgtacccagtagtcattcaggagcaggttgttcagtttccatgtagttgagtggttttgagcgagattcttaatcctgagttctagtttgattgcactgtggtctgagagatagtttgttataatttctgttcttttacatttgctggggagagctttacttccaagtatgtggtcaattttggaataggtgtggtgtggtgctgaaaaaaatgtatattctgttgatttggggtggggagttctgtagatgtctattaggtctgcttggtgcagagctgagttcaattcctgggtatccttgttgactttctgtctcattgatctgtctaatgttgacagtggggtgttaaagtctcccattgttaatgtgtggaagtctaaatctctttgtaggtcactcaggacttgctttatgaatcttggtgctcctgtattgggtgcatatatatttaggatagttagctcttcttgttgaattgatccctttaccattatgtaatggccttctttgtctcttttgatctttgttggtttaaagtctgttttatcagagactaggattgcaacccctgcctttttttgttttccatttgcttggtagatcttcctccatccctttattttgagcctatgtgtgtttctgcacgtgagatgggtttcctgaatacagcacactgatgggtcttgactctttatccaatttgccagtctgtgtcttttaattggagcatttagtccatttacatttaaagttaatattgttatgtgtgaatttgatcctgtcattatgatgttagctggttattttgctcatgagttgatgcagtttcttcctagtcttgatggtctttacattttggcatgattttgcagcagctggtaccagttgttcctttccatgtttagtgcttccttcaggagctcttttagtgcaggcctggtggtgacaaaatctctcagcatttgcttgtctgtaaagtatttaatttctccttcacttatgaagcttagtttggctggatatgaaattctgggttgaaaattcttgtctttaagaatgttgaatattggcccccactgtcttctggcttgtagggtttctgccgagagatctgctgttattctgatgggcttccctttgaggggtaacccgacctttctctctggctgtccttaacattttttccttcatttcaactttggtgaatctgacaattatgtgtctgaatctgacaattatgtgtcttggagttgctcttctcaaggagcatctttgtggtgttctctgtatttcctgaatctgaatgttggcctgccttgctagattggggaagttctcctggataatatcctgcagagtgttttccaactttgttccattctccccatcactttcaggtacaccaatcagacgtagatttggtcttttcacatagtcccatatttcttggaggctttgctcatttctttttattcttttttctctaaacttcccttctcacttcatttcattcatttcatcttccatcgctgataccctttcttccagttaatcgcatcggctcctgaggcttctgcattcttcacgtagttctccagccttggttttcagctccatcagctcctttaagcacttctctgtattggttattctagttatacattcttctaaattttttccaaagttttcaacttctttgcctttggtttgaatgtcctcccgtagctcagagtaatttgatcgtctgaagccttcttctctcagctcgtcacagtcattccccatccagctttgttccgttgctggtgaggaactgcattcctttggaggaggagaggccctctgctttctagagtttccagtttttcccccatctttgtggttttatctacttttggtctttgatgatggtgatgtacagatgggtttttggtgtggatgtcctttctgtttgttagttttccttctaacagacaggaccctcagctgcaggtctgttggaataccctgccttgtgaggtgtcagtgtgcccctgctggggggtgcctcccagttaggctgctgaggggttaggggtcagggacccacttgaggaggcagtctgcccattctcagatctccagctgcgtgctgggagaaccactgctctcttcaaagctgtcagacagggacatttaagtctgcagaggttactgctgtctttttgtttgtctgtgccctgcccccagaggtggagcctacagaggcaggcaggcctccttgagctgtggtgggctccacccagttggagcttcccggctgctttgtttacctaagcaagcctgggcaatggtgggcgcccctcccccagcctcgcagccgccttgcagtttgatctcagactgctgtgctagccatcagtgagactccacgggcgtaggaccctccaggacaggtgcaggatataatctcgtggtgcaccgtttttaagcccctcggaaaagcgcagtattcgggtgggagtgacccgattttccaggtgccatccgtcacccctttctttgactcagaaagggaactccctgatcccttgcgcttcccaagtgaggcaatgccttgccctgcttcagctcgcgcacggtatgcgcacccactgacctgcgcctactgtctggcactccctagtgcgatgaacctggtacctcagagggaaatgcagaaatcaccctcttccgcgttgctcatgctgggagctgtagaccggagctgttcctattcagccatcttggctcctccccaagagagagctttgttttaatagctgcaaatatttttgattcataaccttgagacaatttgtataatttcctattttttgtaggaaaacatacttgttcacttaaagttgtaaagtctttctttgccatctgatattgactttattgctaatattgttattagcccactttccatgacttcattaagttttaataaactagcatataacaggctacacgggcttttagaattaaaagcattgcaaaagtcacgcctccttgtgaaaaattattaataggttaaatgagcaaataaggcgctcttcacagatgaagcacgaagcaaaatcttgattttccttcaaacttgcagtgcgcattcagggaggggagtgctgagaagggatatgtgggattccgaaattacacacttgaggtagaaatttctgtcaagcccctcactggaggggatggagaacaccttgggtttctcagcagaagtcactggccctgtgagaaggagaccctgcccttgagaagtctaaccaccgccgccttcatgtccttgttccgcatgctgtaaataaaggggttcagcaggggagtcaccactgtgtacatgacagcagccgctgtatcctcctttactgagttggaggaagaggatgaggggcacagataagccctgatcactgtcccaaagaacaaagcaacaacaacgaggtgagagtcgcaggtagagaaggccttgcgccttccctgggcagagggggccctgaggatggctgaaacaatgcggatataagagaccaggatgagcataaaagggattaaaatgactgctccccctaggaagaggagcacaagctcattgacctgggcgtcagagcaagacaccttcatcagcggtcccaaatcacagaagaagccaggaaggatctaagagcacaaggaaagccggaatatgaggaaggtgcgagtcatggcgagaagacttgtgagggtccagcaggctgtcaccaggaaggcacagcggtggaggctcatgatcatcatatagtggagcaggtggcaaatggccacatagcggtcataggccattgtagccgggagaaagatgtccatgtccccaaaagtcaagaagaagtagagctgtgccaaacaccctgcgtaggaaatggacctgctctgggtctggatattcaccagggccttgggcacagtggtggaggtggaaaagatatctgcacacgacaagctggcaaggaagaagtacataggggtgtggaggtgtgtgtcagtgccaatggccaggacaatgagcaggttcccagccacagtgaccacgtacatccacagaaacagcaggaagaagatgtgttgctgctgtggctggtctgagagtccccagaggaggaactcaaaggtgctagtctgattccctccttccaggagctcagaggtcggaggaaaaaaatcttgagtgagccccattagaattctataaaaatgttttactttagattggtgagcatgctattctctgagctttaaggaagaagaagaagaaagaaagaaagtacttttattggccatctactatgttgcactgtaaatttttactgaaatacactatgctagaaagtgtgcgagatacaacataaggtaattaaaatacatttctcgtttgtttttctacactcttttccatcccaaatttctttagttgtactctcagaggagttaagatgctttctttcattaattttacagaaattaattactgactctggacctggcacagtgataacccttaacctcagggaattttcgatctaatgggctagacataactgcttctattaaaatcttatatgagttggatacaagttttccagccattcacctgctttcaaaccactctcagaccccaagactgcacctgttctgattaatcaagcccaaaactcaatattctctgaagatgcaatttcatgttatctattcttctggaaaccaattcaacaatcaactatttagagaatctgatttgttctttggagtttcactgacacctcaaaaagtaacctgtatatagtgggtctttactagtctccagaatcttaaacaggacaggaccgaatgtgtcctgaaagagaagctgaaggccaaaactcagcaatcaggtaactcaacccagggttaccactggagaagcaggtagggctattctgatggaagaggccttcatatggatagaaacatcagcaataggccgggtaagctgactcaggcctgaaatacagcactttgggaggcctgggtgggcagatcacttaagggcaggagttcgagaataacctgggcaacatggtgaaaccccatctctactaaaaatacaaaaaaattagcctggtgtggtggcaggcgcctgtaatcgcagctactcgggaggctgagtcaggagaatcgcttgaaccagggaggctggtagtgagccaaaattgcctcactcatgccagcctgggccacagaatgagaaaaaggaaggaagaaagaaatcagcaacagggagtaaaggtcccctaatgagtacggccactatgtgggggtgacttttctctccattctgactggtaaaattccacacatttccacacaaatgccacctactacttaattcatggtccttctataagaaaaaggttgttcctgcaccaaacttcccaatattttgactacacatctcttttttgaacatttttgtgcccccgtattaatgatagattctttaacatgctatgtcgtccacacagtagctgtagtagtgtcttgaatatagagaaataaatgttattaaatgatttagagtttccacttttctactttcctttcctgaatttattcttctaaaggctgagaattttaaaacacggagtgaaacatgagtttgggtcagtttaattcagttcaattctgcaaacatttatcagtcttctcaccctctgtacatgcatcttgactgtctttacccagcgaagcagtgcattctgtgttttttatctgcataaacacccttggactgaatggagtgaagtgttgactggcggtgatggctttgaggactctgtgaaagggagaagttctaaaacataatttgatcaagtcacagataaaactttcataagattttggtatccttttcaacaactacatatctgaagaaagaataaaaagggtacaaagggaactacattaagaaaagggtgcatggaaccatttatatctgaattatgtattcgggactaaacagtgattgtccagatcctgattttcttatgtatcccctgagaactatgcaaagtgacaaggaggggcaatataagctcagatacatatactttcattgaaactgagtgtcagaaacatcccacaattaaaaaaaaaaaaaaaaaaccttggaaatgagtggaagaaaacaccatgaatcagccccatcaatgtggaaagtaaaggccaagtagcaaagtaggtgagtagggcagggagtaatggggagtatcagaatctacaaatccttagctgacaatcatgcctagaaacagagggcataaccctgagggatagttatgtatagatctgaggaaacagggcaagaagtcatgctgaacaaaggtgaagaggaaaggtgaggcacttgtacacagaagcctcatgtgatgaagcaaccttcatcattgtagcaaaggaaggagtccctgaatggagaatctgggcaagttaccctcatcttgctaaatctctggtacagaaaaaaggcaaattgttcaaatgtgaatcataactaatgactaaattgctggacctatacagaaatataaaaaaaggaacccctgaaaagtcaagctttttatcacaagagaactcactaggaaattgtctctattgagaaaaattccaatacaacatgtcttcaagaattacaacatgtcttcaataattttcaaagtgatagaactaattgtgaaagaatactacaaagaggaaataagtaaactcagacaaaataatatgcctgaccacaagaaggtgtgaaataggaactgagagaagtctggaaagaaattaaagcaaaagctacttactcgatgaagaataagttacaaagagtttttaaaaatgaacaatacagaaatcattataaaggacctaaagactagaaatcagaaaagcaaaataaacaaaaataaagaatggagtgaaagacttaaataggtctagaagactgaccaagaagattcagtatattataagcagaatcccaaagaaaaaagtaaatttcagaatagaagattaaaaattaatttaaaatgaacttcccagaaataaaagactttaatctacatatcgaaaaggcatatatcttggaaaatggacataaaatagtaaattccaaaaaatatcttagtaaaattgttagacctttaaaataaacaaagaatccttcaagtaaccagttcctcttccccaaccaaaaaaaaatcaggttgacatcagtcttgatagcaactttttataccaggaaataataaaagaacacttacaagaaactcagaaatataaagataagccaggagttttatagcaaccagtctgtactttaagtataagggctacaagcaaagagtctgaacataaagaaactcagggattattgttcccatggctctttctggggtttctactagaagatgcggttcatataatcaggaaaatgttggaataatcttagtgaaaagcattgaatatagatttactgcagaactaaactaggatcagaatgtggggctaaaggtgacaggataatacctaaatgcaatatatgctaataatatggaaataactagccaataagtgcgaaaaggaagaaagtaggaagtataagtttctgattatctcttaggagaaaaggaatatcatataaagcaaataagtcaaatagtagaagcttaagcttgtctaagaggataaagaatattcttgaaaaaatagtaatattgaatggtgaaaaagaggtaggagacgggagaataaagtttacaagttaatttcattgtatataataaggaacaaaagatactgtctaaagaaagaagagactaaaggtattatattatgatattagcattatgaaaacttcctatgatcagaaagagaatggcagactacatactaaacataaagtcatatggcacaccaacacatcagttatgttaataaatgtaaatgagcttaatgaaccttttaaaagaaaaatccttcaaactgactctcaaagcaaaacccaactctattctgtatataagagaaattgctaaaataaagtaattcagaatgattgaaaatgaaatgataggcaaagacataggttaatgtgaccaaaacaatgtgatccttatatcgaaaaaacagaattcaggaggacaaaactaaacctacaatcaaaataaaaatctataatatttatgaagcttagtttggcttagttcaaccattgtggaagacagtgtggtgattcctcaaggatctagaaccagaaataccatttgacccagcaacctcattactgggtacatacacaagggattataaatcattctactataaagacacatacacacgtatgtttattgcagcactattcacaatagcagagacttggaaccaacccaaatgcccatcaatgatagactggataaagacaatgtggcacatatacaccatggaatactatgcagccataaaaaaaggatgagttcatgtcctttgcagggacatggatgaagctggaaaccatcattctcagcaaactaacacaggaacagaaaaccaaacaccacatgttctcactcataagtgggagctgaacagtgagaacacagggacacagggaggggaacatcacacactagggcctgttgaggggtggggggccaggggagggatagcattaagagaaatacctaatgtagatgatgggtcgatgggtgcagcaaaccaccatggcatgtgtatacctatataacaaacctgcacattctgcacatgtatcccagaacttagagtataataaatctataatatctgggtactacataaaacagaaattttctttaaaagatacacgaagaaacagaaacacattaataaaaagagaaggttttgtcagtccaaggcagatcaagtgattaaaaaaggaaggatagaaaatatcaaacaaggccaggcgcggtggctcacgcttgtaatcccagtactttgggaggctgaggtgagtggaacacgaggtcaggagattgagaccatcctggctaacacagtgaaaccccacctctactgaaaatacaaaaaattagcccggtgtggtggcaggcgcccgtagtcccagctactcgggaggctgaggcaggagagtggcgtgaacccgggaggcggagcttgcatttattcttaagttatttcatagattttgtcattgttgctgctgtgattttttttttcaatttctatttttagcctgtggttaccaaagctgagaaaaaatatatagcctgcactcatatatatatatgtgtgtgtatatataacgtatgtgtgtgtatatatacatatatgtatgtgtatatatatatcccttgtgtcttatctatccatccatccatcccggcttttatgtgcaataatttctacccccagatacttacagggttcctgtcatatagtttatactcagttaatatttgttgaatgagtgaatgtcatactgttagtaaaggaaacgtcacctgttcttgcctcttgccagagatccgctttgagggtaaagagctttgagttcacctagaaaatgagaaggaatcaacttgctgtggtcaaacacaagagcccaagagtccaagtttttgagtttgagagaattgggcttgagtcttgattctaccatttaaaagttatatgaactttaaataattgttaaatgattatttattacttttagagatagggtcttgccctgtcacccaggctggagggcagtggtgcaaccatagctcactttagcctcaaacatgtgcactcaagtgattctcctgcctcaacctcttgtatagctgggactataggcaaaggccactgtgcccagcttatgtgaacattttaagtaatttctctaaatgtcaacttcctcaccggtaaattgagataataaatagtttcttccttttactgtattgtgaaggttaaataaaacaggtaaagaactttggaaagtatcctggacagtaaggtctcaataaatactgattcgtactcaacagaggttggtgaatatttttctttgaaatttaaaagttccaagatacgtacatgtataagccattgttcttcaataattatttgcagaattctgagagccatttagatttctaattgcaagtctctattttagtacaaagggctctaatattttcctttggagtttctcaaatttttgcattggattttagttctctattccctataactatcaggcagaaggtggggtgatgcagccaggagccaaggatcccctgcggccacctgaagcttggagagacagggaaggatcctcccctggagccctggaggcagtgtggccctactgacagcttgatttaggacttcacacctccagaactgagagagagtgcatttctgtggttttaggccacgaagtttgtgacaatttgttgcaacagcagtggcagtacacataccaggtaaagtaacacaggttccagagatttggatgtggacatatttgcgaagccattatctagcctaccagtctttattcatttttgtttgtttgtttgtttttgtttgagacaaacaaaactccagactgctctctctcccagtctggagtgcagtgacgtgatcttggctcactgtaagctctgcctcccgggttcacgccattctcctgcctcagcctccggagtagttgggactacaggcgactgcaccacacctggctaattttttgtattttttttttttttttttttttagtggagacggggtttcaccgtgttagccgggatggtctcgatctcctgacctcgtgatccgcccgccttggcctcccaaagtgctgggattacaggcgtgagccaccgcgcccggccttttctcgttatttttatctcttgttgctttcctgtgaaacttttgaggaattcttaagtttttactctacaaaacagatgatcacttctggagggttcatattaatattatctgcaccctacataggctttttaaatttacatttttatgttgcaatattttaaagtaaattgtaattattgtggcattacacccctaaatattcagcctacatctctttaaaaaaaaaacaccttcttccacttgccccaaatagcactttcacaccaactcaattaatgatgatttcttattattattcattactgggccatattcaaatctttccagtttccctgaaactatcctttttgtctgctttgttaaaataggaatccagtccagaaccttgcattgtatctaggagccgtgacccaagaatgtcctaaattccctctagagtcactggagacagacctggctatcatcctgtgtgaaaggagcacgctgaggcttaagaggctgagtgagttaccccaaagtcacacccctgataagtagcagaatctggatctgatcattactcttttgattccaaatgttatgccctggtgtggtgtgctttgcaaagaagagtggccatgcacagcttatatttggacccaaatagcttttccttctggccagcaggcccattaatcagatgctgtatccgctctcttagtccttcctcccaaaaagtgcaagtgtcaagattttttttttttttttgagacagagtctcactctgtcgcccacgctggagtgcagtggcacgatcttggctcactacaacctccgtctcctgggttcaagcaattccctgcctccgcctccctagtagctaggattgcaggcgcccaccaccacacctggctaatttctgtattttttgtagagaccgggtttcatcatcttggccaggctggtcttaaactcctgacctcgtgatccacccgcctcggcctcccaaagtgctgcaagtgtcgagatttcatttggtgactccataaactgcctcgggaatctcttgtctttgggatgaaaagacttttagacttttacagtccttcctccccaaaagtgcaagtttcaagatttcattatatttttgttatcaaatcattaggtctttattccctacttgactttgactcttggagatggagaacatgtcttaggtactttcatattctctcagcaccatttctctgttgaacagaggctctcctgggacttgtgtcccaccccagctgggaggcttaccttccagcctgtgtccacgacagccaccatcacaatgacctgttgcctcttctgtcctctacatcatcggaaatacacattaaaaagctgcttgagaactcggaggctgtccccctgtggcgcgatgaacacggccaggttccccttcctctgtggcagcagaactttgctgtaccccaactgcagcaggatagcagatgggagatttctgttcattaaccccacgacctctggaataatcctaggttctccagccctgggctacaggggacttgtcctatttatttatttcccaggtaggctctgtgtgagttccctggggtgtcccttgggaaatgggagctttgtcatttcccatgccctctgtatcccctcaggagcagtttcttggaatggggaaggatgtggtccaacagtactgggatttcttgcatgagaagttattatctgcctgtttcttgggtggaactaaagagctaaccaatctatcaaaaaaaatctcctttcatatttgcaatgatactcttaagtcgcaaaaggcctctgctaaaattaaaatgtgttgcctggagggaatcatctctcgagaccatagagaaattgtgaagccatggccattctcatttcagtgtgggttttttcttggagtctttatgagaagctcattctaaacttggtcaggaaatggggagatgccaagagaaagacacagtgcttcgtgagcctccagcaagaagtagtttgggaacaaggggcagcagatgttagaaaactgcgggctgtggacatacctccagctccacctgcagatccccagtgaacatgagctccagggtgcacagccattgccttccccagagtggggatccagcactggtcctctgggtgcagctgctgcaattgtgattagagctcagatccagaaccatgtccatcccaccagcatctctgtggccacaaacttgattgctcttcctccagaaaaagactggaaaagaaaagctcaattttagaatatacttacagttgtcttagaatcactaacccggccgggcacggtggctcacgcctgtaatcccagcactctgggaggctgaggcaggcagatcacaaggtcaggagttcaagaccagcctggccaacatggtgaaacctcatctcttctaaaaatacaaaaattagccgggcatggtggcgggcgcctgtaatcccagctacttgggaggctgaggcaggagaactgcttgaacccgggaggtggaagagattgcagtgagctgagatcacgccattgcactccagcctgggtaacagagcgagactccttttaaaaaaaaaagacctagattaattctccctgccccctttcggtgtggttatgttgctcatttgaaagacagtgggagtgggaggggaatgtgttataaaatcataaaacataccatataggcagatagattgagctctaggtatagatgttgatacagctatacaaacagatatgtatataaaatcaagtatagaagaaaaccaaaaaataatacaactagaaacaaataaatctaactgtatttcaaattaataacaaaccacactgaagaaaaggaaggagatctaatccaagcaactcttgaacatagcaatttgactatatatgttcaggataaagaaaactaactttaaaaaatatattctcttgttattttctttttacagtagtatggaaatactttatgtatattctaagatttagcaaataaataaatataatatggacaacataataagagccaggttgcataatgttgaagaagggagttacaaatacggaaagggttggccaggcatggtggctcacgcctgtcatcccagcactttgggaggctgaggcggtagaccatttgacgtcaggagttctagaccagcctgaccaatacggtgaaaccccgtctctactaaaaatacaaaaattagccaggcatggtggcaggcatctgtaatcccagctacttgggaggctgaggcaggagaatcacttgaacccgggagatggaggctgcagtgagccgagatcgtgccactgtactccagcctgggtgacagagtgagactccatctcaaaacaaacaaacaaatacagaaaggggaagggctagaatgaaccctgagatgttgcactggaattgaaagtatggttataagcgcatagttctggggagagagaggagatggaggtgtgtgtatttgtgtatatgcgtatgtcttggctctgtccattgaaaggacctcgaagcaatgacaactcaatagcaatgagcacatctattaattacccagacctcagctttgaaatagcattctcttctaagagaaataaagactttttggagaaacgtataattccacttctggacagagaaaataaaagatgagtctggaacatttgttttgccagaaaggaggaaagtgttccaaaattgctgaaagcatgccaaaagacacagaagccaactcgaagggttcccagtgacaaagtgggaaaatcaagcaacaatataaagataggaatgaattataactcatagataaaatcaaaataagtttatcatactgctgcaaatggattaataaatgaatgaataaatgaacaaacagatgaataaacaaataataaaaaaaatcttccttggatataatttcaactaatgtataaggcatgattgaatcagaaaaaaaatcatatttagcagacacaataacagttgtcccaggatatttattcattacaaagaaaaaattgtatctcttcagtagacagactagtatatatcacctttcacaagtggtcaacaacagcatcaccaatattgggataaattatgtgccttctcatagaccgcacgcagaaggacatagcatttctgtcatgctcctgcccacagcttcatagcctgaatctacgcatgagaaaatatcagacaaaattcaaactaggcattgatgcagtgatgtcagcaaaatggcaaccaggaagtcccaaacatttaacaacttctcagggacaaaaatagctctgggagagtgccacagtacatttaagaaggttcagcagcacagtgtagcacagaaacagagtggctgcagcatagaaaaacacaggcatacctggtgaggatggtgaaaccttgtctccactaaaaacacaaaaagtagccgggagcggtggcaggcgcctataatcccagctgttagggatgctgaggcaggagaatagtttgaaccctggaggcagaggttgcagtgagctgagatcacaccactgctctccagcctgggtgacagagcaagactccatctcaaacaaaacaaaaaccaaaacacaaaaacagaatggcgaatcctttccagaaggttttcagtttactttgcccaggtacatcagtggaatcactgtctatggcagccacagccttacaaaacgtgtttcttatataatagacttgaaaatagacatgacttggccaggtgcggtggtttgtgcctgtaatcccagcactttgggaggccgaggcaggcagatcacctgaggtcgggagttcgagaccagcctgaccaacttggagagacccccatctccactgaaaatgcaaagttagccgggtgtggtgttgcatgcctgtggtcccagctactagggaggctgaggcagaagaatcacttgaccccaggaggcggaggttgtggtgagctgagatcacaccattgcactccagcctgggcaacaagagtgaaactcttgcttcaaagggggtacaattgcttgggttctgccccgctctgtcaggtggagtcagcattggcaaagactgtggaggtcctcagtggggaaaggtgtccaaagtggagagagctcctgagacttaaaaaaaaaaaaaaaaggagacatgactccccgatctacgagctgcagaatggacgttgtgtttgaaaacaacattaatctccttgtgtgtctccatcagagtccttgagtgaacaggtgcattgtcaatgagcagtgatattttgaaaggaatcttttttttctgagcagcaggtctcaacagtggcttacaatattcggtaaaccatgctgtaaacagatgtgcagtcatccagaattttgttattccactgatagagcacaggcagaatacatttagtataatcgttaagggctgtaggatttttgaaatggtaaaagagcattagctttaacttcaagtaaccagctgcattcgatcctaacaagagtcagtctgttctttgaacctgtgaagccaggtcttgatttctcctctctcgctcaaaaagttctagatggcatcttctcacacttgtgttacggagatggtcccttccttttccctcctctctctctctctttcccttccttcctctatttctctctttctctttctgatggagtcttgctctgtcacccaggctggagtgcagtggcacaatctcggctcactgcagcctctgcctcccaggttcaagcgattctcatgtctcagcctcccaagtagctgggactacaggcatccgccaccacacccagctaatttctgtatttttagtagagacagggtttcaccatatcggagatggcttattttcttaaaccttatgaatcaacctctgctagcttccaacttttcttgtgtagcttcctcccctctctcagttttcatagaattgaagagagtcagggtattgctctggattaggctttggctaaagggaatgttttggctggtttgatcttatccagaccactcaacccctctccacgtcagtaataagacggtttcacttccttatctttcataagttcactggggtagcactttcactttcttcaagaaccttttctttgcattcacaacttggctgtttgacgcaaggcttagcttccagtctatccctgctttagacacgccttcctcactaagcttaataatctctcgattttggtttaaagtgagaaaggtgggtacagtggtgcacacctgtaatcccagctatttgtgaggctgaggcaagagggtttctcaagctcaagagtttgagaccagcctgggcaatatagtgagaccctgtctcaaaaataataataaaataaagtgaaaggcatgcaactcttccttcacttcaacacttaaaggccattgtagggttattgactgacctaatttcaatattgttgtgtctcagggaatagagagacccaaggagagggacagaggcaatggaattgctggttggtggggcagtcagaacacatacaacatttatcagttaagttcaccatcttacatgggtgcagttcgtggagccaaaaaccaattacaagggtaacatctaaggtaaatgatcataaatcaccataacagatataataacaaaaaagttttaaatattgagagaattaatttgacacagagacctgaagtgagcacatgttgttggaaaaatggcaccaatagacttgctcaaggcagggttgccataaaccttcaatttgtaaatttgaaatatcttcatacaataaaatgaggcatacctgtatatgaacatttttctggcattattccatcccccaggctggaaaagcaggtgccaagagggatcctgccagcagcaacttcccctcatgaggggaaaagaagagtaggagatccttcaggacctctctccactttggacacctttccccactgaggacctccacagtctttgccaatgctgactccacctgacacagccgggcagagcccaagcaattgcacccccatctctggagacaaagcaggaaccgctgctacatgccaatatccctgatgaacatagatacaaaatccctgaagaaatactagcaaacccaatttaatggcccatacaccacaatccagtgggatgtatccctagggtacaagaatgattgacagatgcaaatcaatcaatgtgatacaccacattaagagaacaaaataaaaatgtgttaacagaatgaattttaaaatgaaagaaataaatgatcacagagacacaagtgtctcaacagaagtagaaaaaaacatttaacaaaattgaacattctttcttgataaaaactctcaacaaaatagctatagaggatgcagaggaagatggctcaatagaaacctacactgatcatcctccttgtaagaacaccaaatttacaactatctacacacaaaaaccaccttcatgagatccaaaatcaggcaagcaatcacagcacctgttttgaacttcgtattgctgaaagaggcactgaaaagtgtaggaaagacagtctggaattacagacgtcgcccttctcccatcccccagcagtggctacatggtgcagagagagactgagtgcttgggggagagagaatgcagtgagtgtgggactttgtattgaaagtcagtgctgccaaccgtgggtaaaactcagctaatgtccatgaagggcgcatttagacaaactctagccagaggaaaattgcccatcccagcagctgggtcagaacccaagtttcagcaaggctcaccaccacaggctaaagtactctggggtcctgcaaaaacttgaaatgcagtctaggccacaaggactgaaactgctaggtgagtcctggtgctgtgctgggctcagagatagtggacttggaggggagggcacgtgacctagtgagacaccagatggggcagctaaaggagtgcttgtgccacccctcaccaacccgaggcagcatagcttgcagctttgaaagaggcccttctgcttgagagtgaataagaggactttgtcttgcaacttggataccagctcagccacagtgcccagggcactgggcagttgcaaggcccccatttcaggcccaaattcccagacatttctggacacaccctgggccagaagggaacctgctgccttgaagggaagaactcagtcctggcaagatttatcacctgctgactaaagagcccttgggccccaaataatcagcagcagtaaccaagtagtacacaccatcagccttgggtgagactcagatattctggcttcaggttagacccagtacactcacagctgtactgtctatgaaaagagatgccttctggttaagaaaagcagagggaagcacaaaggggactttgtcttgcagcttaggtaccagctcagccacagtcgggtagagcaccaagcaggctgttggagtccttgattccagttcttggctcttggatggcatttctgggcataccctggacccaaagggagccttttgccctgaagggtgagtcccaggcctggcagcattcaccatgaggctgattgaagagccctggggccttaagcgaacaccggcagtagcctgctgacatagtttggatatttatccctgcccaaatctcatgttgaattgtaatctccagtgttggagatagggcctggtgggaggtgcttgggtcaggaaggcagattccttacggtttggtgcacgcctcgtgatcatgagcgagttcttgagagatctagttgtttacgtgtgtagcacctcccataacaactgtctttctctcccacttttgccatgtgaagtgtctgcacccttctgccagaggaaaagttccctgaggccttcccggaagcagatgctgatgtacagcctgcagaactgtaagcctattaaacctcttttcttataaattacccagtcttggatatttctttatagcaatgcaagagcagcctaacatggaaaattggtattgagaagaggggaatttctataaagatacctgaaaatggctacatctgaaaatgtggaagtgactttagaactgggtaatgggcagaggatggaagagtttgaagggctcagaagaagacagaaaaatgtggaaaagtttcgaacttcttaaagactggctaaatcgttgtaaccaaaatactgatggtaatatggacagtgaagtccaggctgatgaggattcagatgtaaatgaggaacttactagaaactggagcaaaggtcacccagtttatgccttagcaaagagctggggtgcattgtgttcatgctctagggatctgtggaaggtcgaacttgagaatgatgacttaagatatttggcagaagaaatttctaagcagcaaaacattgaagaaattgcctggcagcttctaacagcccacactcagatgcaggagcaaagaaataacttaaggttggaatttatatttaaacaggaagcagaatgtaaaagtttgaaaaatgtggagcctggctatgtggcaaagaaagaaagaactttttatggagaggaattcaagcaggctgtagagcaaccacttgctagagatacttgcataactaaagggaaggcaagtgctactatccaagacaatgtgaaaaagtccttgaaagcatttcagagaccttcatggcagcccctcccatcatggatccagaggcctaggagggaagaatggtttcttgggccaggctcagggttctgctgccctgtgtagccttgggacactgttcccatatcccagccactccagctccagctgtgattcaaaggagcccaggtacagctcatgctgccactttggagaatgtaagccataagtcttagtggcttccatgtggtgttaagcttgcaggggcacagcaagagtgaaggaggcttggcagccttcacctagatgccagaggatgtatgggaaagcctgacatccaggcagaagtctgctgcagaggcagagccctcacagggcagtaaggagaggaaatgggggattggaggacccatacaaagtgtgcccactggggcacagcttaatggagctgtggaaaaagggccaccaccctgcagaccctagaatggtagatccactggcagcttgcaccctatacctggaaaagccacaggtactcaactccaggccatgagagaagccacaggggctgaaccctggaaagccacagtggtagagctgcccaaagccttgggaggccattcctcatatcagtgtgcccaggatgtaggacacggagtcaaagattattttggagctttgagatttaatgactgccctgctgggtttcaagcttgagtggaacctacagctcctttcttttggccaatttctcccttttgcaatgagaatgtttaaccaatgcctatagccccattgtatcttggaagtccataacttgtttttgattttataaactcaggtggaagggatttgccttgtcttggatgagaaattgaacttttggaacaagttaagactttgggggactgttgagaaagcatgattgtgttttgcaatgtgagaagtacatgagatttgtgggggaccagaaatggtattatatagtttggatatttgtccttgcccaaatctcatgttgaattataatttccagtgttgcagatggggcctgatgggaggtgtttgggtcatgggtggagattctccatagcttggtgctttcttgtgataataagtgagttcttgcaaaatatgattaagtgtgaagcacgccccttccccacctctctctctattgctcccattctcaccatgtaaagtgcctcaaacttccaccatgagtaaaagctatctgaggcctccccagaggcagatgccagtgttatgcttcctgtataggctgcagaaccatgagccaattaaacctcttttcttttaaattatccaatctcaggtatttgtttatagaaatgcaagaacagcctaatacacctgtcagtatttcttatgggcctgtggtggtggtggacatggggagagactcctctgtctgaggaaaggtgggggaagagtgggaaggcctttttcttgtggtttgggtgtcatcttcagatgcagtaaattgagcaccaggtagatttctaaggcttccaactataggccctggctcccagatggcatctctggactcacccagggcctgggtgacttggcagtccaaagtgaagaagacaagcctggttgtctttaccacctgctgactgtagagccctagggccttgagcaaacacaagtggtagccaaggagtggtaacagtgggtcttggatgatacccagtgctgtgctgtcttcaggtctgacccagcacagccctagtggtggtggccacaggagtacttgtgttacccctcccccaggaagctcaggaagcttccaggaagctcagcacagagaaggggagagagagattccatttgttttggaaaaagtaagggaagagatcaaaagtttctgcctggtactccagataatccttctggaccttatccaagaccaccaaggaggtaggtacctctacaagttggcaaaaaccacagcattactgagcttgaggtgcaccctaatgcagatatggctgcagtgacaaaaaaaaatgtagatcacaacacccaagtcccttcaaatacctagaaagcatttccaagaggacaggtacaaacaagtccagactggcaagactacaataaatatctaacccttcaatcctcagccactgaaaaacttccacaagcatcaagacaatccaggaaaacacggcctcaccaaatgaactacataaggtaagaggaaccactcctggagaaacagagatatgtgaactttcagagagagaattcaaaatagttgttttgaggaaactcaaagaaattcaagataacactgagaaggaactcagaatactatcagataaatttaacaaagaaattcaaatggataaaaagaatcaagtagcaattctgaagctgaaaaatgcaattgacctgcaaaagaatacagcagagtctcttaatagaaaaaatgatcaagcaggagaaagaaatagtaagctggaagacagggtatttgaaaatacacaaaggaggcaaaaaaaaaaaaagaataaaaaagaatgaagcatacccacaggatctagaaaatagtctcaaaaaggcaaatctaagagtgattggccttaaagaggaggtaaagagataatgatagaaagtttattcaaagggataatagcagagaatatcctaaacctagagaaagatatcaatatacaagaaggttgtagaaaagcaagcagatttaacccaaaaaagactacctcaagttatttaataatcaaacttccaaagatcaaagataaagaaaggatcccaaaaggagcaagagaaaagaaaaaaataacatacaatgaagctccaatatatctggctgcagacttttcagtggagaaaagggtaggagagagtagcatgatatatttaaagcactgaaggaaaaaacaaagtttaccctagaagagtgtatctggtggaaatatccttcaaatactaaggagaagtaaaaaccttcccagagaaacagcttgctgagggatttcattaacactagacctgttctacaagaaatcctaaaggatggtctccgatctgaaagacaaagatgttaacgagcaataagaaatcagctgaaggcacaaaactcagtgctaatggtaagtacatagaatattaattgtggtgtgtaaattcttctgatcttaattagaaagacttaaagaagaaccaatcaaaaataattaccaaaacaactttttaagacacagatagtacaataagatataaatagaaacatcaaaaaattagagaggtggagggatgaagttaaagtgtaaagtttttattcattttctttttgcttgtttgtttatgcaatcatgttaagttgccatcagtttaaaataataggttataacacattatttgcaaacctcatgataacctcaaatccaaaaacatacaatggatacacaaaaaaataaaaagcaagaaattaaaacatactatcagaggaaatcaccttcactaaaataaaaaaaaggaaggagggccaggcgcagtggctcatgcctgtaatcccagcactttgggaggccgaggtgggtggatcacgaggtcaggagatcgagaccatcctggccaacatggtgaaactccatctctactaaaaatacaaaaattagccaggcatggtggcgggcacctgtaatcccagctacttgggaggctgaggcaggagaatcacttgaacctgggaaacagagattgcagtgagccgagatcgtgccactgcactctagcctggcgacagagcaagactccatctcaaaaaaaaaaaaaaaaaaaaaaaaggaaaagataggaaggaaagtaagaccacacaacaactataaaacaaataataaaatggcagtggtaagtccttactcatcaataataacactgaatgtaaatggactaaactatccaatcaaaaacatagagtggctgactgaaaaaaagcaggacccagtgatctgttgcctacaagaaacacgcttcatctataaaggtacacagagactgaaaataaaggggtggaaaaagagtaggagtgggtatatttatattagacgaaataaatttcaagcaaaaactataaaaagagacaaagaaggtcattatataatgataaagggatcaattcagcaaaaggatataacaattttaaatatgtatgcacccaacattggagcacctagatatataaagcaacattattagagctaaagagagagataaaccccaatgcaataatactggagacttcaacagcccactagcattggacagatcttccagaaagaaagtcaacaaagaaacttcagacttaatctgcactatagacctacatggatctaattgatatttatagaacatttgctccaatggctgctgaattcacattcctctccttagcacatgaatcattctcaaggataaaccatatgttaggtcacaaaacaagtcttaacacattcaaaaaaactcaaataatatcaagtatcttctctgaccacaatggaataaaactagaaatcaataatgagagaaatttttggaaaatatacaaatatatggaaattaatatgctcctgaatgtccagtgagccccaactggttagtactaaaaaatgcccaggctacagcatcacaaggtaaaatgggaacccaatccaaagtggggtgggtcgctttactgtggggggctccctatcactgaaagccctaaacaggcaaaacagcctctaccagcactttgggaggctgaggtggacagacacctgaggtcaggagttggagaccagcctggccaacatagtgaaaccccacctctactaaaaaatacaaaaattagccaagcatgatggcgggtgcctgtagtcccagctacatgggaggctgaggcaggagaatcccttgaacctgggaggcggaggctgcagtgagccgagatggcaccactgcattcctgcctgggcaacaagagtgagactccatctcaaaacacaacaaaacaaaaaaaaacaagaaaaatgaactcgattgccttccacagcacccctaattccaatgcgcatccttctagcaaaggggagaagaagaggagtcagaagtaagggaaaacagggggaggagccaacaaggccgaataggaacagctccggtctacagctcccagcgtgagcgacgcagaagacgggtgatttctgcatttccatctgaggtaccgggttcatctcactagggagtgccagacagtgggcgcaggccagtgggtgcgcgcaccgtgcgcaagccgaagcagggcgaggcattgcctcacctggtaagcgcaaggggtcagggagttccctttccgagtcaaagaaaggggtgacggacgcacctggaaaatcgggtcactcccacctgaatattgcgcttttcagaccagcttaaaaaccggcgcaccacgagactatatcccacacctggctcggagggtcctacgcccacggagtctcgctgatggctagcacagcagtctgagatcaaactgcaaggcggctgcgaggctgggggaggggcgcccaccattgcccaggcttgcttaggtaaacaaagcagccgggaagctccaactgggtggagcccaccacagctcaaggaggcctgcctgcaactgtaggctccacctctgggggcagggcacagacaaacaaagagacagcagtaacctctgcagacttaaatgtccctgtctgacagctttgaagagagcagtggttctcccagcacgcagctggagatctgagaaccggcagactgcctcctcaagtgggtccctgacccctgacccccgagcagcctaactgggaggcaccccccagcaggggcacactgacacctcacaaggcagggtactccaacagacctgcagctcagggtcctgtctgttagaaggaaaactaacaaacagaaaggacatctacaccaaaaacccatctgtacatcaccatcatcaaagaccaaaagtagataaaaccacaaagatggggaaaaaacagaacagaaaaactggaaactctaaaacgcagagcacctctcctcctccaaaggaatgcagttcctcaccagcaacggaacaaagctggatggagaatgactttgacgagctgagagaagaaggcttcagatgatcaaattactctgagctacgggaggactttcaaaccaaaggcaaagaagttgaaaactttgaaaaaaatttagaagaatatataactagaataaccaatacagagaagtgcttaaaggagctgatggagctgaaaaccaaggctcgagaactacgtgaagaatgcagaagcctcaggagccgatgcgatcaactggaagaaagggtatcagcgatggaagatgaaatgaatgaaatgaagccagaagggaagtttagagaaaaaagaataaaaagaaatgagcaaagcctccaagaaatatgggactatgtgaaaagaccaaatttacgtctgattggtgtacctgaaagtgatggggagaatggaaccaagttggaaaacactctgcaggatattatccaggagaacttccccaatctagcaaggcaggccaacgttcagattcaggaaatacagagaacaccacaaagatactccttgagaagagcaactccaagacacgtaattgtcagattcaccaaagttgaaatgaaggaaaaaatgttaagggcagccagagagaaaggtcgggttacccctcaaagggaagcccatcagactaacagctgatctctcggcagaaaccctacaagccagaagacagtgggggccaatattcaacattcttaaagacaagaattttcaacccagaatttcatatccagccaaactaagcttcataagtgaaggagaaaaaaaatcctttacagacaagcaaatgctgagagattttgtcaccaccaggcctgcactaaaagagctcctgaaggaagcgctaaacatggaaaggaacaactggtaccagctgctgcaaaatcatgccaaaatgtaaagaccatggagaataggaagaaactgcatcaactaacaagcaaaatcaccagctaacatcataatgacaggatcaaattcacacataacaatattaactttaaatggactaaattctccaattaaaagacacagacagtcaaattggataaagagtcaagacccatcagtgtgctgtattcaggaaacccatctcacgtgcagagacacatataggctcaaaataaaaggatggaggaagatctaccaagcaaatggaaaacaaaaaaaggcaggggttgcaatcctagtctctgataaagcagactttaaaccaacaaagatcaaaagagacaaagaaggccattacataatggtaaagggatcaattcaacaagaagagctaactatcctaaatatatatgcacccaatacaggagcacccagattcataaagcaagtcctgagtgacctacaaagagacttagactcccacccattaataatgggagactttaacaccccactgtcaacattagacagatcaatgagacagaaagtcaacaaggatacccaggaattgaactcagctctgcaccaagcagacctaatagacatctacagaactctccaccccaaatcaacagaatttacatttttttcagcaccacaccacacctattccaaaattgaccacatacttggaagtaaagctctcctcagcaaacgtaaaagaacagaaattataacaaactatctctcagaccacagtgcaatcaaactagaactcaggattaagaatctcactcaaagccgctcaactacatggaaactgaacaacctgctcctgaatgactactgggtacataaggaaatgaaggcagaaataaagatgttctttgaaaccaacgagaacaaagacacaacataccagaatctctgggacgcattcaaagcagtgtgtagagggaaatttatagcactaaatgcccacaagagaaagcaggaaagatccaaaattgacaccctaacatcacaattaaaagaactagaaaagcaagagcaaacacattcaaaagctagcagaaggcaagaaataactaaaatcagagcagaactgaaggaaatagagacacaaaaaaccattcaaaaaatcaatgaatccaggagctggttttttgaaaggatcaacaaaattgatagaccgctagcaagactaataaagaaaaaaagagagaagaatcaaatagacacaataaaaaatgataaaggggatatcaccaccgatcccacagaaatacaaactaccatcagagaatactacaaacacctctacgcaaataaactagaaaatctacaagaaatggataaattcctcgacacatacgctctcccaagactaaaccaggaagaagttgaatctctgaatagaccaataacaggagctgaaattgtggcaataatcaatagcttaccaaccaaaaagagtccaggaccagatggattcacagccaaattctaccagaggtacagggaggaactggtaccattccttctgaaactattccaatcaatagaaaaagagggcatcctccctaactcattttatgaggccagcatcattctgataccaaagctgggcagagacacaaccaaaaaagagaattttagaccaatatccttgatgaacattgatgcaaaaatcctcaataaaatactggcaaaccgaatccagcagcacatcaaaaagcttatccaccatgatcaagtgggcttcatccctgggatgcaaggctggttcaatatacgcaaatcaataaatgtaatccagcatataaacagagccaaagacaaaaaccacatgattatctcaatagatgcagaaaaagcctttgacaaaattcaacaacccttcatgataaaaactctcaataaattaggtattgatgggacatatttcaaaatgataagagctatctatgacaaacccacagccaatatcatactgaatgggcaaaaactggaagcattccctttgaaaactggcacaagacagggatgccctctctcaccactcctattcaacatagtgttggaagttctggccagggcaattaggcaggagaaggaaataaagggtattcaattaggaaaagaggaagtcaaattgtccctgtttgcagacgacatcattgtgtatctagaaaaccccattgtctcagcccaaaatctccttaagctgataagcaacttcagcaaagtctcaggatacaaaatcaatgtacaaaaatcacaagcattcttatacaccagcaacagacaaacagagagccaaatcatgagtgaactcccattcacaattgcttcaaagagaataaaatacttaggaatccaacttacaagggatgtgaaggacctcttcaaggagaactacaaaccactgctcaaggaaataaaagaggatacaaacaaatggaagaacattccatgctcatgggtaggaagaatcaatatcgtgaaaatggccatactgcccaaggtaatttacagattcaatgccatccccatcaagctaccaatgcctttcttcacagaactggaaaaaactactttaaagttcatatggaaccaaaaaagagcccgcgtcgccaagtcaatcctcagccaaaagaacaaagctggaggcatcacactacctgacttcaaactatactacaaggctacagtaaccaaaacagcatggtactggtaccaaaacagagatatagatcaatggaacagaacagagccctcagaaataacgccgcatacctacaactatctgatctttgacaaacctgagaaaaacaagcaatggggaaaggattccctatttaataaatggtgctgggaaaactggctagccatatgtagaaagctgaaactggatcccttccttacaccttatacaaaaatcaattcaagatggattaaagacttaaatgttagacctaaaaccataaaaaccctagaagaaaacctaggcaataccattcaggacataggcatgggcaaggacttcatgtccaaaacaccaaaagcaatggcaacaaaagacaaaattgacaaatgggatctaattaaactaaagagcttctgcacagcaaaagaaactaccatcagagtgaacaggcaacctacaaaatgggagaaaattttcgcaacctactcatctgacaaagggctaatatccagaatctacaatgaactcaaactaatttacaagaaaaaaacaaacaaccccatcaaaaagtgggcgaaggacatgaacagacacttctcaaaagaagacatttatgcagccaaaaaacacatgaaaaaatgctcatcatcactggccatcagagaaatgcaaatcaaaaccacaatgagataccatctcacaccagttagaatggcaatcattaaaaagtcaggaaacaacaggtgctggagaggatgtggagaaacaggaacacttttacactgttggtgggactgtaaactagttcaaccattgtggaagtcagtgtggcgattcctcagggatctagaactagaaataccatttgacccagccatcccattactgggtatatacccaaatgactgtaaatcatgctgctataaagacacatgcacacgtatgtttattgcggcattattcacgatagcaaagacttggaaccaacccaaatgtccaacaatgatagactggattaagaaaatgtggcacatatacaccatggaatagtatgcagccataaaaaatgatgagttcatgtcctttgtagggacatggatgaaattggaaatcattattctcagtaaactattgcaagaacaaaaaaccaaacaccgcatattctcactcataggtgggaattgaacaatgagatcacatggacacaggaaggggaatatcacactctggcaactgtggtggggtggggggaggggggagggatagcattgggagatatacctaatgctagatgatgagttagtgggtgcagtgcaccagcacggcacatgtatatgtatgtaactaacctgcacaatgtgcacatgtaccctaaaacttaaagtataattaaaaaaaaaaaaaaagaagtaagggaaaacgttgaggagttacaagtaagttgtcctgaaagtgacagactcctgtcagtggtggggactccatggaagctcagggtctggggtgagtccatccagaggtggtacagggggagaggagctacatagaatgggctgtgctctatgtgcagccagcacaagacaggagaagagagagtgggggggatggggatgaacaacagtataaacagccaggataggagggcttgggtctcagggggtggacagaaacaccaggatgccagtgacctctaagggccatgttccctccacaggactaaggactcaggcactggacaggatgactggctctgtcagacctcagagtacagactgagcaagaacctcacccacctcaagtatgggaacattccctgtaaagtaacactgagcacagcgtgttcctgccaaagcctccctgctgaggctgctgagaacttcctaaatcccttcaagagtcactgaaggtagacgttgctatcaacctgtactatataaggaaactgaggctcaaagaggttaagtgacaaaaaactaaaaataaatctaccatatgatccagcaatctcactgctgaatatatgtccaaaagagaggaatatatagaagtacatagaagatctatctgctctgctatacttgttatagcattattcacaatagccaagatatggaatcacccgaagtgtccatcaatggataactggataaagaaaatgtggtatacacaatggaatattatgcagccataaaaaagaatgagattcggtcattggcagcaacatggatgaacctgagagacatcatattaagtgaaataagccaagctcagaaagacaaatattgcatgttctcactcatgcatgggagctaaaaaaattgatctcatgaaggtaaagagtagaatgatgattaacagaggctacaaaaggtagggagaaggagggaatgaagagagtttgcttaatgggtacaaaaatacagttagaaggaataagttgtggtgtttgatagctcagcagggtggctatagttaataacattttctatatctcagaatacctagaagatctagaatgctctcaacataaaaatatgataaatgtttgagatgatggatattccaaataccttgatttgattatatatagtacgcatgtatcagaatatcacatgcttcccataaatatatgcaattataatgtatgaaaaataaatagataaatgaaactgagtgagttgcccccaagtcataccctgataagtagcagaatctggatctgatcgtgattcttttgactccaaatgctattcttcggtatggtgtgcttaggaatgaatggcaatcaagagcttacatttgcacctgagtagttcctcctagccagctattgttcattctgattggggtctctcccactgatggtcccagagatcttctcgtgttctcgtgtgtctcctgagttccttccatcagtgccttgaaaacacagactcccctcaaccccacccctagacttcgtgtctggaggttctcacatactctttcttctgcctgaaacattctcttctctcccaccatccactccctatctcttcatttaacttctattcatcccttaggtcacaacatgagcaccccaaagaggactttctgcaccttcctggctattctgatatttctaatatccccctattttaacaccactagaatttccaatatttatttgattacatctatcaccagataaaagcttcaataagtcaggacccctatatgttttgttctgcgtgtgattcctcagtacctaaaataactcatggcacaaaagagatattcaaggaatactggatgctggagtcaatgaagacatgaacactggaagatgtataattcaaccttttcattctacaattagaaaaccgaggcacagggaagtaaacaaaaagctagtttccctggattcgtgagcatgtgtggcagggtgagtgctagccactgaccatatattccaagaagtctaggaccctgtactgtctgcaacacagtggaatgggtcaacggtaggcttgccttgatgcaaagcaagagatcattcccacccaaacctgtaacccttgaatgtcaaggaccagtctgctagaaaagtatttctcagtcaaagcacaacccccccggccttgttttttttttagagtgcccaactttctgagactcccagctgggatgaaagtatgaaatacacagccatcctaaaaggctcatcctgagattgtctctgtgaagggaaacccttctttcacgagttggtcctttagcccagtggggctggctctgaatcactccaggtccccttgtttgtgaagctggccctggccacaccagcctgcagggatccttctgtggcttcactcccatattacctattttctgtacccttcatctggtgatgcccacagactgtctttggaatatcttgacttcagcttggagagacgtttacacttatgtcatctttctttccaaacagtacaaggatcaagatttcatattcgcttaccagaggcttggatctttactttcttacctaacccagactcttcagagatgaacagcatgttacttccttacaataaatgaataaacagatatataattggttccttttctctatatattatactatgtgttttacataagtatatataattttatatattatataaataaaattggttctatttcagatttgtgtgtgtatgtgtgtgtatatatattaccatttctctggagagccaacatgctttccctgtgaacaaaaatgacaatggaaaataaaaataaggatagcgaattctttatagctgcagagggctgacaacatcccgaactgaaaatctggttcagagatactactctgacaagatcttaaactgaaaataaggcacaaaattatctcactctctttttctagtataaaggctcatataaaatttttcaactgtaagcatcctattcggtttttagttcaaaataaatatatcctcgaatagaagtttttttcaagacactttaattttcaaatattatttttatatcttatggaatgtgatctttaatcttgtgtctttcaggcatgttaacctgatggcctcaattaattagttaattgactaaataatgatttcaaatttgcacctctgatttctggaactattcgtactacctgctttttttgtttgttttttgtttttttagttgctagagacttggaatttcacccattttctatttctgcttaaagataaatgtaatgtctgactccagtggacttctttaaactaaaatatgagtttactgctcactctatgacatcatattttcaatgactttattttcattaagtttgtttcttttttacactgtctctcagttttaatgtcttaagaacgtaaaaaatatatattttttgagacagagctttattcttgtcagccaggctggagggcaatggcgtgatcttggctcactgcaacctccgcctccagtgttcaagagattctcccgcctcagccttccgtgtagctggaattacaggtgcacgccaccacacctggctgattttttatatttttagtagagatggggtttcactatgttggccaggcttgtctcaaactcctgacctcatgatcctcccgccttggcctcccaaagtgctgggattataggcataagccaacatgaccagctgaaaaataattttttttaaaaaattttgctaattcttaaattctgttcaagtaaaaaactgtattccaagtatctattcctgtgatcatataggccacagctgatgtgatacaatgacttttttattctactagtggatatctagttaactagaaggcttaacatatttaaacttttttttctctatttataaactcaagaaccaaacaataacctgagtcacaagaattggaatatattttgctcctattaggacaaatacctaatatgcatgcggggtttaaaacctagatgatgggttgataggtacagcaaaccaccatggcacatgtatacctatggaacaaacctgcacgttctgcacatgtatccaagaacttaaaataaaaagtaacaattaaaaaaagaatacattttgctccttgcatttcttcccagtcttcagattcatggtctttgttaagttattcaaagatttaaaatacaggttattccaaaaaaaaatttaatttgtgcaaataagattttattttaataggatattttcaccacatgttgtaaatatatccacaatagaaataacctagctgggtatactttgagttgtgaaattttcctcttaaaactctaataattcttcagtgttttcttgcattgatgttttgtagggagaagtctaaagctaatttgaccttttatttctctttaggtaatcctttattccctggcattaaactttcaactattttcttattatactttcagttttagggtacatgtgcacaacgtatgttgttacatatgtatacatgtgccatgttggtgtgctgcacccattaactcgtcatttacattaggtatatctcctaatgccatccctccccgctccccccaccccacaaaggatttataatcctttgggtatatacccagtaatgggacggctgggtcaaatggtatttctagttctagatccctgaggatctaaaaaaaaaatttcctgtcactaaaataccaaaatattactaagatacatctatggataatttcattaatagtctcaaaactacagtgaggctttccatttgtgatctgaggttttcgattttctaaaacatttccttttttgtaacttttttttttttttttttttgagacagagtctggctctgtagcccaggctggagtgcagtggttgtgatctcggctcactgcaacctccgccttctgggttcaagtgattctcctgcctcagcttctggagtagctgggactacaggtgtgtgccaccacgccagaataattttagtatttttaatagagacagggttttgccatgttggccaggttggtctcgaactcctgacctcaggtgatctacctgcctcagcctcccaaagtgctaggattacaggcatgagccaccgtgcctggcctgtaactttaattgttgcttttgttctatttgttctgctttctttttatgaaactattactccgaagtgagagatccacattttctccaatgtttttcattttctttccttattgttttaaactctttatctttttaatcttctttaaggaaagacttctgaagtcagttctacatgttattaatttattttctgaaatgacaatttggctaaaatgccaattaaaatctttttctgtcccttttttatttctgtttgccgttttctggtcaactttattttcattgagtttgtttcttttttttttttatacagtctctcagttttaatgtcttaagaagaagaaaaataatttaaaaatttttggttcattcttaaattgtgttcaagtataaaactttgtcccaagtatctaaaatgttgattgctgttttttattctgcaaatatttttcattgatcattccttttatacaaaatgtctgtaaaaaagaagggatttaaccaaacctggaatttgccaacgaacaaatgtactctctcttatctgcaggtttttctctttgggggataagtggaatatagtgatttccttcataagttaatgaaatctgcagtcacagcccacagaaaatatgtgcaaatgtttgaaagttaaagcattattttctttatggttctttggttctttttgagacagtctcgctctgtcacccaggctggagtgcagtggcgtgattttggctcactgcaagctctgcctcctgggttcacgctattctcctacctcagcctcccgagtagcagggactacaggcgcccaccaccacgcccagctaattttttgtatttttagtagagatggggtttcaccatgttagccaggatggtctcaatctcctgacctcgtgatccacctgccttggcctcccaaagtgctgggattacaggtgtgagccaccgcacccagcctctttatagttcttttctatgcccgtgtgcaactccttgtgcctaatgagtacccagtcaacaaaacctggaagtagtaagacattctgagaaggacctcaatagtgaaatgttgttactaggaagaaaacatttattgtgggatgtcatatctgtgtttttggaaactgtgtcctagaaactacagcatgagctgaacacagggcaagtaaaaatagagcaaacaggatggtgtgacctgaaacatatctagaagaaaatgcaattgaacaaaagttgttgcaacatccagcgtttgcagaatctcctagaagattttagagagttgtccaacaattacataactagtttaggtgttagtaaataatagataatgtttactaaatgctaactgtgggccaggctcagttttaaaaacttttcaggtattaatttggtgctcataataacttcatgaggatgttattattattatttctattttgcagatgagtatataagttaataactgtccaaggtcagtttcaggtgatatgcgcagagccaggattgaaaactagccagggcttatagcgttcatcattgccctaaacaaaaacatagtaacttctctgccagtggaggtgttaagtcatagtatcatgaccgttaattaaagctattataaaagtggcaggcaggtgaagtggactagacatataggcccttttcatctctgaaactctaaaaaattaaaatacctacctttagtatgcttgattttaaaagtatgactcttactctaacccttctcaagtcaaatcctagagaaaagagaaaatataattcttctttgcatcctaaacaccaggaaggattgagcatgagctagaagaaagaccaaccactcaattgtactctagtccttgtagctcccaaggcatggttccaagtttgtgctagacagcagagaagaggggtctgcattccaataagtaggatgaactagcttggcccatagtttggaccttggagacatactctccaggaaatcctcttgcccatcctttcctctgggatgatgtttattttggaaaataaacctgaggggggcttctggctgagttaggttagaggcactctgtcttacagactaagaaattttaaggattcagggcaggagagtttatcagaggcttggactgcttctgtgtctccttgttgtgcttatctaggagggagagttgtgtgcctgttcccatacatcttcctgcagctgcagggataccccccgagtctgcttttagcttccgttagtgcacctgaagggaaaggaatgtggttattaaggcccactgttttactggggcccattgtatgagggtgaagtttggcagttacccaacagacttttcccccgcctccctctgtgcccaagctgtcttatctgtgtttcactgtctgctctttctggctgcttgttgttagaagagaagtgatttctttgaaatgcatgaggctagaaagagagctgaaacttaaagtggtggagtttgtccgagatgagggtgctcctgctctgtcattaacatccagccctgcagatgtctgtcatccagcccatgtgcccagtaaactttcctctggtgttgggttgctttagatcccacagtgattaattctatcaacctcttctccttttctggtgctatttctcttacagtctttaatttttttattttattttattggcttctggttgtccttgcaccagattgtcattccaaaatgttgccctattgatccggcatctaatgtatgggccccatacctatgtttacattaaaccaaagggacctaatgaagacagtacaaattccttgtgttagtcaaaacccttcataatttaaccccaaatttcttttcctgactgaattcttcctaatcccttccctgtaccctcggctcctgataaagatatataacacatttctggccagacatggtggctcaggcctgtaatcccagcactttggaaggctgaggtgggcggatcatgaggtcaagagatcaagaccatcctggccaacatggtgaaaccccgtctctactaaaaatacaaaaaattagccgggcgtggtggcgggcacctgtagtctcagctactcgggaggctgaggcaggagaatcgcttgaacccgggaggcagaggttgcagtgagctgagatcgtgccactgcactccagcctggtgacagagtgagactccgtctcaaaaaaaaaaaaaaagatatataacatatttctatttaaaattaccctcattactgaacactttgtccttgagtttttcttaatgataatgctagggaagcaggagcctgggagagacagagtaacgccattttaagtacagctccatcttgaaactaacaaggcacattccctgccagtcacaacccacggtcataagacgtttataggtgagaaaacagcctaaagatacctgtaaggacacattcctacaacagcaaaaagtccagctgtcccaatacctataacaagacatgctttcaagaaaattgtaagccaaaccatatcactctatatatgtctcagaatggtttttagtgttctgtacaatatatatttaagaccttttgtgttgtagggcatgtacatttttgaaaatggatgctaaggagaacgtcctctgaatctctaattataccctcatcacaatgtatgagaatacacccacacttttgctcaatatatgaggaagttttaattttaataaatgtgaatggtgaaaaaaaagaaaattatgcttcgatgtactcacacagcagaatatcaagaatagttttctttaaatcaataaaataataaattttgtcatgccatcagccaacccgcacattgttacagcttagtttagtcttgacataaacaagatccctatataaaaacttgacacaaagccagtgcattcctctgcttagtttctgagggtgccctaccctgtaagagagtagctttctagagactactgcttctgactgcactctgcgattcatcttgaattccatcctgtgtgagatccaagaatcctctcctggggtctgaatcaagacccctcttccaggactgtaaggcacaataaggcactgagacctcatccattaggtgatgaggaaacaaggaattgttttaaagagacagacaccatcacttgcattttctaaatgtaattttggggccagtaagcaaatttctctactaataagcctggctgagcatgtaaatacattttttctccccatttattctcaatcttttcccagtgccatggacacacttttgatccaattattatcaaatatgtgaaatctttaccttaaattattaaatgtgtttattataatagtatgattaaaacatcagcaaaacaaagagaataatataacaaaaatttattatctagatttaacaaatataagaatgtggtcttagttattctaagttttttaaataaataaatactacaaatacttttgagactccctttttttccatccaaaatctaattttttcccctttacctccagacataactgcaattctagagttggtagtacgctcccagtcaggatttatactttgactacatacacatgtattattttatccattaaaatttacacatattatatgatatagtatatatctttcagtaacttctttcttcaatcacattattttttataaaatgaggtcagacatgctggctcatacctgtagtcctaactctttgagaggctgggatgggagagtcacttgaggccaggagttcaagatcaggttggggaacatagcgagaccctgtctctacaaaaattttaaaaattatcttattagtgtataggactcctacgtattctgaatatgaattccttatcgattatgtgttctgcaaatacctctttcagttcatggctcatctttccccctccttacggtatgttttttaccaaatgttttccatttttaatgtagtcaaattttacaatattctctttcatgttttatgtggtttaagaaataaattatatcacaaatatattttctctattttcttctaaaatttggaagctttgctcttacaattaatcccttgggaattatttttctgcactttttaaataaatgggtatcccattgttccagcactcttagctaaagtcagtccatcctttctctgcctacagtattataaaccaactcatgtcatacaccaatgtctaataaattgcttggtgcaatgcttggtctgttctgagctctccagtctgttacatagatttaattttcagtccctacaccagaactactcaaatgcttcaactaccacagtaattcattttttaaggaatatgtacaccttatttttttgcatttttaactcattccctttttttaattgatatataatagtcgtatatatttgggggggtacatgtgatattttgatacctgtataccatgtgtaatgctctaattggggtaactgagatatccattgtctcaaacatttggcatttctttgtgttgggaacatcatattcttctcgtctagctattttgaaataatatattattgttaactctaatttccctactgtactatcaaatactagagcttatttctgagaacatagtaattcattttaatacctgaaaaagtaatttttttctcatgcttttcctcaaatggacttagacttcttggctctttatttgtctacgtcaattttaggatagtttggtaagttccatgtttaaaataaacctgtggtatgttgattagattgcaccaaatttatagattaacttgggaagaattgacatttttaccacattgagtttttctatcaccggtgctttcatctccacgtttttagatattctttttttcttcttaagtaaaggtttgtaatatttgataacagtcttggctttttttgttagaatcatcctagattccctaaaatttctgttgctttctgaatggggatctttttcaaattatattttctaagttatttttacctaaatacaaaaacagcattgattattttaaatgatttatatctaacaagctttctgaaatctcttagtgtatctattgattctctttgattttatttctagacaaccacattttctgtgaattttctctatttcctttccaattctcatggggcaaaagtttcttacaatgatcctttcaaatataggacagtattttaagtattttaagcagacgactcaagttaagcttcctgcttctgcagacctgtgactgcatctccagtaccaaaagggaaataatagcacagactccatccctgagagccaaattcctggttcaaaaccccaaaggaccaccacagcatcagttatagcctaaaacccctgctctgagttttctcttgggcttagctacatttacaaaaaaattttaatttatctagaatatgttttaatagaaacaggacctgtcaacatgagtttgctttgccatgttgcccagagttctcctctgtctgaaatcttacacttccgtatcataggagctaataatgtctctgagccctccaaaattactgaatcctttgaaacctgaggtattatgattctgtgtgaagatgagaaagggcatttcaagacagaaagccaagtgactttaggtgcaaagatgaaagaacacatcatgtttggggataagataattagacctgcatacccagggcttagcatgtacttcacatgtatactatatgagacaccaggaattgatgattgaattaattatagatcggattaactattcagcaaagtgttttaagaaaaaaagttaggatatattgggctacagtaacaaatacatcagaaaatgtttaggctgggcatagtggctcatacctgtaatctcagcactttgggaggtcgaggcaggtggatcacaaggtcaggagttcgagaccagccgggccaatatggtgaaaccctgtctccactaaaaatacaaaaattagatgggtgtggtggcagaggcctgtagtctcagctactcgggaggctgaggcaggagaaccacttgaacctgggaggtggaggttgcagtgagccaagatggcaccactgcactccagcctggtgacagagcaagactccatctcaaaaaaaaaaaagtgttttaaaaaaataaaagtaattgtttaaacaaataagaatttctttttctctaatggtcatagtgggccctcttggtcatgagtggctctgctggatatggagagctagggacataggctcatttcaccatgcaactccatcatcacattcagcctcttcaccatttgcattcagttgggacaaggagaaaaagggtatggaggagctcaatgagtagaactcagttggtaaaatgaagttaccttaccacacctcattgcaagggaggctgggaaatgtagtctaatagagtgtccacgaggaagacagcaacgcagatttaggtgagcagctggtagtctctacgacaattagtatgatctcaaaatgcaagatggatcaaagaagagggaactgtagtgaagcagttaagggactactacaatacttaagttgaaaatgatgatggtctaagctaaattagtaaagggtaatttagcttaggtaagtaaagagaaaagttgagttatataacaattttttcaaatgaagattcaacaaggtcagacgtacaggcagaagataaactggatgagtgtttctgtgagaatcccacatgtggggaaccatgaaataaacctgggttcaactcaataattgagtgcaaattaattggtgcacaaaatgaatgatattttacaaaaatcaatttggaagacataaacataaacaagttatgattttcctcttcaaaaacatcttgcacctgtaatcccagcactttgggaggccgaggtgggcaggtcacaaggtcaggagatcgagaccatcctggctaacacgtgaaaccccgtctctactaaaaacacaaaaaattagccaggcatggtggcgcgtgcctgtagtcccagctactcgggaggctgaggcaggagaatggcgtgaacccaggaggtggagcttgcagtgagctgagatctcgccactgcactccagcctgggcaacagagtgagactctgtctcaaaaaaaaaaaaaaaaaaagaaaagaaacatcttgcaaactacttaggttttaagtgcagagtgtggggtttggtcagacatgttagcaggatgactgaatatggaaatatgggaaaaagaaatcgagaccacagatacagacatgacagtttactaaagaatagttgaatccactgtggacttggattactacaaaaagaaataaggaagacaaggaagagaagactgctatggattgagtttgccctcaccaaaactcatgttgaaatgtgatccccagtgtgggaggtgttgggaggtaaagcctagtgggaagcgtttgagtcaagggggtggatccctcatgagtggtctggtgctgttctcatggtagtaagtgtgttctcattctctcaagactggattaatcttaagggaatgttcctacaggagtgggttgtgataaaaccagtatacttctcgggttttctctcttcccctgtatccacttccctgttgaccttctctgacaggttatgatgcagcaagaaagcccttgccagaagccagggccacgctcttgaatgtcccagcctacagatccatgagacaattcaacctcttttcttataaattccccagtctcaagtattctgttatagcaacacaaaatgaaccaagacaaaggccagtggaaaaagcactgtgattatgtatagttatgggctttgaaaagagagaaaagctgtcaaaaagatagggaatatctttgaaaatcgaacacctgtggagtaagttcactgagcttgtttttctaggacctaatgccagttgtctttctgttttagaatctgatggcagtgtagacacctctgacttcctgggctctgggctcaccccgagactggttggaggaacaactttaaattgttcactgcattcctactatgatacatcctttgcactggaggattttttgtttgtttttttcacaaggactccaagaggctatccttttcttaccatgtgtaataaaattattgtgtgagtctggctttcctattcaattataaggtccttgagaacagatgctatgtcttgtgtaacaaataagtggatgaataactgtattttcacatatttattgtttctctacaaagtaaaaaaaaatctaagacatgaaacatgaaattaggtttttgttatgtgattaaattatagatattaaggtggtggtgctacatttggaaggacaaccatctttacttcacagatcgctaacttctttgacatgagtgtccaggaggtcaatgagagttcgtcccattgaccaacagagattttacccaaaagtgctggctatatttatgattgtaaaaaccaggtatagccatggctaatgaaaagtggtggataagtttgacagcaggtgaatttgtaaaataattaaaaacgtttaagtggtagataaggcagactataacacacactaactgcgctaataattctgggttcctctcccctttcatgctgaagaagccatgaagaaagaaaatcaatcctttaacctggattttattctcctgggagttactagtcagcaagaacagaataatgtcttctttgtgatttttttgtgcatttaccccatcacactgactggaaatctgctcatcatcttggccatctgtgctgacattcgccttcacaaccccatgtattttctccttgccaacctctccttggttgacatcatcttctcatccgtaaccatccctaaggtgctggccaaccatctcttggggagcaagttcatctcctttgggggatgcctaatgcagatgtatttcatgatagccttggccaaggcagacagctataccttggctgcaatggcatacgatcgagctgtggccatcagctgcccacttcattacacaacaattatgagtccacggtcttgtatcctgcttattgctgggtcttgggtgattggaaacaccagtgctctcccccacactctgctcacagctagtttgtccttctgtggcaaccaggaagtagccaatttctactgtgacattatgcctttgctgaagttgtcctgttctgacgtccactttaatgtgaagatgatgtacctaggggtcggcgttttctctttgccattactatgcatcattgtctcctatgttcaggtcttttccacagtcttccaagttccatctaccaagagtctattcaaagccttctgcacctgtggctcccacctcacagttgtttttttatattatggtacaacgatgggcatgtatttccgccctctgaccagttacagccccaaagatgcagtgataactgtgatgtatgtggcagtgaccccagcattaaatcctttcatctatagtctgagaaattgggatatgaaggcagccctacagaaactcttcagcaagagaatctcctcatagccgctgtgagattacacgctggatactgtaatgaccaagtgggatacacttggaaatccagctccaatgtcattgcccttcaagaagctccttttgttcttttgagccagaaattcctctaccagaaatcttgtaacggatgtgatattttattgaaattatcactttggacaaattcctgctcttttttgagagagtggcaggctgggaatatcaggttcatgtcccagttagcagaaatttactagcagagtaaagttgaaaaagtctgagtctcagcttgcatatctacatgttaggaaaataatatctgccggactctctgacacagcttgtgtatatcaaaatggctcatgctttgaaggctgcaaattactattctaatgtaatctttactggacttttatgtctagccacccctactatacttgtactctggtggcaaaagctgtgttaacatatcacttacttttttagtattttgatcatataaaatattggtggaaagcaggaaaatgtataaaaatattagtttctgaaatacaatctgataatgaataaacataatcaaactgcatagtattcattcatgtattatagagctggtatgtctgttaaggtcagttaagatccatgcaggaaacagaaatcacacttggtatatttataccaagaagatttgatacagagaattggctacataggtgtatcctgaaagagactaaatagtgaaaaggcagatgctgatgccacccacagattaccaacggcatgaagaagatacctcaggcagaactaggaaaataaaagtgtaaatgtggtgttaccgaaacctagaccctccaaggagggatgaccacacatttgatgcccaggtctctgaacacaggtaccaaagagctggcacttggcccttatctggtcagctaagccaaattttcacttctggggatctgaggcctcagcagtagtagcgactgtttaaatgcttctggttggtgcagtttatattcacctttgctactgggtatggaaagaataagaagcaccccagacataattgtaatcatgagcttctgcctctcattgtgtagcagcaacacaatgtctttggtaactgggtcagtcactccagccagtagagaaatccctttctctgaatgacccacagagccatgctacaatttggttaaatctcagcaacacgacattaagtttgaaaaatgcaaatcccaaaagattattattaatgctttttatatggttatgaacaactgaaacaactaaaaatgtgctttcctggaatatacataaatgccattaaagtgcactaaaaacaaaagaaaatgatgagcataggatcaggatgagagaaaattcaaggggagagactaaggggatggaaatggggatagcgtatggttagatttcggttgctactaaactcataattttcaggttgggtgatgggtcattgggtattcatggtagtatgatagacggatgtatagataggtagattgattaaataaaagctcttcatgatgcaataacgagagcatgagagttcgtcttgagacaatgattagtaagagggcaataagggaggagcaggtagtggttagatcaggagtgaaattaggcagcccctaaaacaatcttaggatgagacagtgaagacatagacaaagggtgagatagagtggtaatatggaaatagaaaaaataggatatagtatttttatgataatagtaagtaaaggtatgtctttaagattttgaggttgagccactaaaagaaaaaaaaaaatgcctttagtggaaatagtgaacaagagtactatgagaaaaacttaacaaaaactaacactgagaacaaggtggcagagtaataagttgcagaccttcccctcacccacaagtacatccatttagaaacaattcatggataaatttcccttgtgagaaatcccaaaactaattgaaaggctcccacatctcaggcaaatgttaaactagacttaccaaaaagccacctaagagactcagaacatccagccaacaaattccctaaccaagcacagtgtcatataattagtaagagaccccgtagctcccagcttctgccactaaacggaggaagttggtttgtgcatccagtgccccaatgtgtctggaagactctttagagggctggtgtctctctgacctgacttggagctctgatgggacaatctagctgccagaaaaagaatgagagggtgctgtgggctggtagatgccatagattccataccccatggtttaacacaaagtgtatgaaaagcagcccatgaagactgtgagaagttcctgctttgtctaatgcacagacaccaacacggtcaaaaaaaaaaaaatgaagaaccaggctaaattgtaccaaagtggctgggcacggcggctcacacctgtaatcctagcactttgggaggctgaggcaggaggatcatgaggtcaggagatcaaggccatcctggctaacacggtaaaaccccgtctctactaaaaatacaaaaaattggccaggtgtggtggcgggcgcctgtagtcccagctacttgggaggctgaggcaggagaatggcatgaacctgggaggtggagctggcagtgaaccaagatcaggccactgcactccagcctgggcgacagagcgagactccatgccaaaaaaaagaaaaaaaaagtaccaaagaaaggagcaagataaatatccagaaaccaattgtaatgaaacagagtaatgtgatttacctgatagagaaccaaaataactgtcataaagatattcactgaagagaacaatgcatgaacaaagtgataattttaacagacagataaaaaatatttttaaagtgccaaacaagaatcatgttgctgaaaaccacaatacttgaaaggaaaaatttaccagaagggttcaacagcagactagatcaactgaagggtcagtgaattcaaagacaggtcattggaaataatttagtaaagggagaaaaaaaagaatagaaatgagtgaagaaagctctatgggataccatcaagcagacaaatatttgtgttatggagtccctgaaggagaaaagacaagaccagaaagcttattcaaagaaataatggctgaacgcttcccaaatctgtagaaggaaatggatattcacacccaagaaaccaaaggacaccagagaagatgaaccaaaaattaaaaatccacactgaggccgggtgcggtggctcacgcctgtaatcccagcactttgggatgctgaggcgggcagatcacaaggtcaggagatccagaccagcctggctaacacggtgaaaccccgtctctactaaaaatacaaaaaattagccaggtgtggtcacgggcacctgtagtcctagctactcaggaggctgaggcagaatggcgtgaacttgggaggcggagcttgcagtgagtcaagatcacaccactgcactccagcctgggcgacagagcgagactccatctcaaaaaacaacaacaacaataacaaaaacaaaacaaaacaaaaatccacactgagagacaatgtaatcaaactgtcaaaattcaaagaggcaagtttgaaagcagaaataaaaaagcaacttgtcatacacaagggaagtttcataagactatcagtgagtttttagcaaaaatgaagaggagataaagactttcccagacaaacaaaaaatggaaaacttcatcaccgctgcacctgcattaccagaaacactgaagggagttctgcaagttggaaccaaatgtcagtaaacctcaccatagcataagaaagtccactggttgtggtggcttacagctacaatcccagtgctttgggaggctgaggtgtgagaactgcttgaggccaggaatttgagatcaccctggtcaacatagcaagacccccatatctaccaaaaatttgtgaaaaaaaaaaagccaggcatggcgtcacatacctgtagtcctagttacttaggaggctgaggcaggaggattacttgagccctggagtttgaggctacagtgagctatgctcatgccactgtactacagcctgggtgacagagtgagatcctgtctctaaaaaaaatttttaatttacaaaacaaaaaaatttttaaaagaaagtaagaaacttattggtaaagataaatatgaagacaaatatacattactgacattactgcataactgtaattgtagataaatcacttttaaaactaatataaaagttaaaagagaaaaatattagaatataaataaaatatattaaaagatacacaatatgaatacatgtgaggtatgaaaacaacaaaatgtgagagaggaaaaaaagtgcaaggtttcgtatgtaatcatcagattaaaattgatggtcataaccagaagatacatataaaccccaagaaaatcacaaaaaaaatcctatagaagttttacaaaagaaaaagagaaaggaatcaaagcataacactaaacaaatcatcaaaacaaaaagaaggtgtcagagagatgttggtcaaaggatacaaaattttagttaagtacaagaaaataagttcaagagatctattgtacaacatgatgagtacagttaacgatatactgtattattgaaaaatgccaacaaagtagatttgaagtgttctcaccacaaaataataactttgtgatgttatgcatattttcattagctagatttagtcattccaagatgtgtgtatatatttcaaaacattatcttatacacaataaatacgtacagttttatctgtcaatttttaaacttttttttttaaaaaaagaaagccagtaagaaaggaaaagacagtcagaagaactacaactaatagaaaaaaaaaacaaaactaacaatagtaagctcttacttaccaaaagttactttaaatgtaaatgcattaaactccctggtgaaaggcatatagtgtctgaaaggattaagaaaaataaaacaagacccaagtgtattctgtctagaagaaactcactttagatttaaggacatataagctaaagtaaagagatggaaaaatatagtcttttattggacaaaacagactttacgtcaaaactatcacagaaagaaggacattatataatgataaaaggatcaatccaccaggaaaatataataattttaaatatatatgcacctagcattggagtaccctaatatataaaacaaacaatgacagaactgaagggagaaataggcaacaatataacagtaagatatggtaatatcccactttgataatgaatagggaaatgagacagaaaatcaacaggaaacagcggacttgaataacactatagaacaaatgaactgtgagacatatacagaactttccacccaaccgcagcaaaatacacactcctctcaagcacacatggacgttcaccaggataaatcacatgtttggtcacaaaagaagtcttaacacctttaaggagattaaaatcataccaagtatatttaccaaccacaatggaaacaaaactacaaagtaatcacagaaagaaaactggaaaatcaaaaaatatgtggaaatttaacagcacacatttgaaccacctatgggtcaaataaaaaagaaaactgacaatatcttgagacaaacaaaaatgaaaatacaacatacctaaacttataggaggcaatgaaagcagtacttagaggaaaatttatagtgataaatacttagattttaaaagatctctttttctccacaaccttgccagcatctgttattttttgactttttattaatagccattttaactgctgtgagatggtatttctcattgtggtttggatttgcatttctctaataatcagtgatgttgagtttttcgtatgctcgttggccacatgtatgtcttctgggaagtgtctgttcatgttatttgcccactttttgtgaggttgttggtttttcttttcttcttgtctaagttccttatagatgctggatattagaccttcattggatgcatagtttgcaacatttttctcccattctgtcggttgtcttaaagtttactccgttgatagtttcttttgctgtgcagaagctctttagtttaactagatcccatttgtcaatttttgcttttgttgccattgcttttggtgtctctgtcatgaaatttttgcccatgcctatgtcttgaatggtattgcctaggttgtcttccagggttttatagttttgggttttgcctttaagtttttaatccatcttgagctaatatttgtatatggtataaaaatggagagaaaattctcaataaccttcttacaccacaggcttcctccttatcagaccagtagtggatagtatcagacatgctgcagattaaaaagacatttgtgggtcaacctttaatatttaccattaatcacaggaatactttgttttattgtacttaactttattgctcttcacatatgttgtgtttttggtttttggtttctgttttctaacaaattgaaggtttatggcaaccctgcatcgagcaagagtatcagtgtcatttttccaatcgcatgtgctcactttgtgtctctatcacattttgtaattatcacaatattctctccttttttattgctgtcatatctgttatgatgatctgtgatcagtgatctttgatcttactattgtaattgttttggtgtgccacaaatcatgcccatataagaaggcaaacttaatcaataaatgtgcgtgtgctgactaaaaaaaaaaaaaaaggtgtaagaaaggggttggtgggtgtgtaaagtggttcaaccgttgtggaagacagtgtgacaagtcttcaaaaacctaaagtcagaaataccattcaacccagcaatccccattactgggtatacaaccaaagagacagaaattgttctattataaagacacatgcatgtgtatgttcactgcagcaccattcgcaacagcaaagacatgaatcaacccaaatgcccatcgatgatagactgggtaaagaaaatgtgtcacatatacgccatggaatactctgcagctataaaaagaacaagatcatgtcctttgcagggacatggatggagcttggaggccattatccttagcaaactaacacaagaacagaaaaccaaatactgcatattctcgcttataagtgggagctaaatgatgagaacggatggacacatagagggaaacaacacacacactggggcctatcagatggtggaggatgggaggagggagagaatcaggaaaaataactaatggatactaagcttaatacctgggtgatgaaataattggtacaacaaacccccatgatacacgtttacctacataacaaacctgcacatcctgcacatgtacccctgaacttaaaagttcttaaaaaggcaaaccaccatgacacacatatacctatgtaagagacctgcaagttctgcacatgtatcacattttttagaagaaatgaagggggaaaagcatcacttccttcataattctatgccattgtgcagttttggcccctaatacgtacccagtaaacaaagcatggaatcagtaagaagttctgagaagggcacaaggagcaaaatgtgattactaagaagaaagtatctatctggaatgtcatcttatctgtgcctgagagtccatgtccaggaaaccgaaatgtagtctcaatatagggcaggtaaagacagagcaaacaggaaggcgcaggcagaaacatgtttgcaggaaaatgcaattctgccagtggttcaacctctaccatgtgtagaatctgatagattttgtagagttgtataatacaacaatcacatgactagtagtaaagcaggcagtattataggtcgtcgtatagaagtagcaaagcatagaggaaggaataacagttaacatttcctaagtgctaactatgtgccaggctgttttaagagctatcaggggccgggctcagtgactcacgcctgtaatcccagcactttgggaggctgaggtgggcggatcaagaggtcaggagatggagaccgtcctggctaacacggtgaaaccccgtctctaataaaaatacaaaaaattagccggctgtggtggcgggcacctgtagtcccagctactcaggaggctgaggcaggagaatcacttgaacccaggagacagaggttgcagtgagccgagatcgcgccactgccctccaacctggcaacagagcaagactccatctcaaaaaaaaacaaaaccaaaaaacagccttcaggtattcattcatttgatccttatagcaacttaatgaagatattgctgttgctattgtggttattccattttagatatgagcaaatgcattaaatacataaatgtctgaggtcagttacaactagttagtggcagagccagaattcaaacccagccagaacccatcatcttctcagggtcctctatagaaaggcagtgaaccctctgccaccggaggtgctgagccacaggataatgaccattagtcagggctactataagggtgacacatatgtgaagtgggccagataacactaggccctttccactctaaaaacaaaaaaaaaaaggcctactatctgcatgccacattaaaaacaagtagacaagtataacttccaccctaaacttccttgagaataaattctagagaaaagatgaaatataactcttctctgtagtctaaacagcagactggaagaaagactaggagcttcactccaccataatccttgtagctcccaaggggcacttctgcgtttgtgcaaaggagagggggtcacattccaacagcgaggttggaatagctcaccccagggcttggaccttggagacacactctctggaaagcctccagtccatccgtcctcctggaaatgattactcttgtgagccactgtgtcccctcgggacacaggtgaaggagtatgtaaataagctgcaacaattactctaactttggctcggatgaagtcctggaggaatcacctttccagagacttgataaccgggtgactaatgcccacttttctctatgctgtgacctgcctgcttccttgaggaggaaactcgactccttgtcctcaagctctttcggggtagctcctcttgtcccttcggctcccctgttgggaaactggggactcctccttctaaaccatcccattcctgtgtcctccacctcaggaacagaggattgttccccatcctgccactgcttctccagcatggctgccctcaaacgggatgctagcaggtgctagatgaactaactgcaaacttcctttctgtggaggagaagtgaaggccacagggccaggaccctttttaaaagcatctgaactgactccacagatagggacttagacattggaagagactgtatcacagcaacatcaaagggtagacagccagcaactgtaggctacttgcccaagaggtaagttgaattatgatgtcattttatcaaacataaaaagacggtaaattgaactgcccaaagacacacacagagatagtggcaaaattagaactcaaatcttggcctggctccagtatccaagttctgaggatcagatggacaagagagagatagagatagagatagagatatatatatagagagagagagaggaggaggaggaggaggaggaggaccctccccttctgataatgtttctccttgggctgttgtccatgaaaacagcatcagaaaaagataattctgatttgcttttctcagtctttagctctttctacctcctatagtaatatagtgtgtgtgtgcatgtgtgtgtgtgtaagagagagcgagagcacctgccaaaagtgcattgtcttagagacctacaaaatcaccttggtcatgctaatgggcccattagaaaacatggtatttcattaccaaagcactgatgagctgaactatcatggaagtctcaaagtactgagagatgcatcttggtggtctacactgctacccagataaggggaaacacttgcctcctctgtccctgcagaattgttctcagcaccaccccattcacatggctgatatctcagaggatgacgctttccaggaaagtgggtattaaaggcgccgcaatgttcaaggccctgacgtcatcccagtgaactcaaggcccgctacgtctccagcatgcatgttgaggcacctcctggcttctcttcttggtggtagagggtctttttacctctttcccctagtctgatatatggcccctgggtccctcttccagtataaataaacctccatttattctcaacctctttacaaggaacattctatctcctaccttaaatgaaacatgaacttgagccacccagctccatcgctgtcctctggaccaaatcatcacagaacatgtgaaataacaacagaagctcatcatctagattatacaaatggaacattaggtatttgctccaactgtttctttttaatttttttaaattattttatttttccttaagttactggggtacaggtggtatttggttacatgagtaagttctttagtggtgatttgtgagatcctggtgcgcccatcacctaagcagtatacactgcaccatatatgttgtcttttatccctcgcccccttcgcactcttccccccgagtccccaaagtccactgtatcattcttatgcctttgcatcctcatagcttagctcccacatatcagtgagaacatacgatgtttggttttccattcctgagttacttcacttagaataatacaacataaatattgcaggccaggtgtggtggcttatgccgggaatttcaatactttgggaggctgaagtgggaggatcacttcaggccaggagttttagaccaacctgggcaacgcagcaaaaccctgtctctacaaaaataattgttaaattatttttattatttttaaaaaatttttgtgggtacatagtacaattcaatttaccatatctttatggggtaacatgagatgttttgatacaggcatgccatgtgaaataaacacatcatggagatctacaaatccaatttttaaaaaattagctgggagtggtggcacacacctgtagtcccacttgagcggcagattcagggtgactgcttgagaccaggagttcaaggctgcagtgagccatgatcataccactgccctccagcctgggcaacagagtgagaccttgtttctaaataaatcgatattacagatacacttgaaattttctttgttcccatccaaaatcttattttctgcctttcactccagagaaaaccactattctattgttgatagtatattcctattcagaatttacacttttaccacatacaaacgtattattttatggttaaaatttacatatacattgtgacatgccatatatcttccagcaactggctttttatcatcacattgcttttcttccctaatttaccccatgaatttattcattttaactattgcataggattcactactaaaaaatagcacaatttacttatctatgcctccgtgggtagaccatttctaagtttcccatatgacaatgcacatgtgcccgtcttcttttttcttttccatttttttttttttagatggggtctcacactattgcccaggctggtcttgaattcctgggctcaagcaattctcccacatcagcctcctgagtggctgaaattatcttacatgtgtcttcttccacccatgtgctacagtttctctagaagctaagcagaaagcagaatggctgggtcagagatgtgtgaatttcgactttcctggatatgggctcactattttctgaatgtaatataatactactgtattcatttttcccaacacttggaattgtcagagttttacactttacacactccaagatgaaagatgttaaatttaattttatttttaatttagttaaaggtctttgcttattgggccatgccagtttcctatgacttgcctgttcaagtctttggaccattatcttctgccgtattgctggtcctttttttgttgttgttgtttttgtttttttgagatgaagtcttgctttgtcacttaggctggagtgcagtggcgcaatctcgactcactgcaacctccgcttcccgggttcaagtgattctcgtgcctcagcctcccaagtagctgggatcacaggcacccaccaccacacctggctaatttttgtgtttttagtagagatggggtttcaccatgttatccaggccggtctccaactcctggcctcaggtgatctgcccgcctcagcctcccaaagtgctgggattacaggtgtgagccaccgtgcctggcctgttggtccttttcttatgagtttgtaggaaatcaattcctatcttgatagcatacacaaattttccctttattttccactaaattttttgacgttttgcttttcacagttaatcctttaggaattatttttctgtataacttctcatatatagataaccaactgtccaatgactctgggctaaatagttcatcgtctccttgcctgtttctaaaccacctcatgtcacacaccactttctaagaaatgcttaacctgtgtctggccttcctagtcgattagaccaaatattgatttctttgtcggtctctaactcactattactccgatgtttgaattatcacagtaaaccttttttgtacctaatgagacaaaaagtacctcactttctttcctcaaattgtcttatctctcctctttattctcctaaatgaattttttttttttgagtcagaattttgctccttcccccaggctggagtgcagtggtacaatctcggctcactgcaacctctgcccccgcagtttcaagcaattctcttgcctcagcctcccaagtagctgggattacaggtgtgcaccaccacgcccagctaatttttgtatttttagtagagatggggtttttccatgttggccaggctggtctcaaatgcctgacctcaggtaatccgcctgcttcggcctcccaaagtgctgggattacagatgtgagccaccgtgcccagtctcctacatgaatttttggatcagtttgtcaaactcatgtttaaaagaaacttgtatctggtttggggttgcattacatttagagagtaattggaagaggactgacattttcacaatattgaggcttccattaacaatttacctcaccaccttttaaatatttttgtgcttcactaaagtttattttttaaatcaattttggatctcttattagaattatttctagattccttaaaattttctatggccattttaaaaaataaatctttattaaaattatattttcttgcactggaaaaagggtctctgggaaaaagtaaaaatgaattccattttctaatttagtgtttaagtacaagaatagtattgatttttgaaatacttgtttataacaaacttgctgaaacatcaattcccttgggttttctttgtagacaatattttctatgaactcttatctttttgttcttttctttccaattcttttatggcaaaattctttctagtgttcttttcagaaataggacaacacttcaagggttttttaacagagtctcaaattagtctccctgcttcgtgtggatctgtggtcacactgtatcaaggggcataaagaccttatacccagccattaagaactagctaatgtctgaatggagaccccaaggggccaccacagcatcctctatggctcatgtttcttgttctgagttttattcttgtttctcacactaaggtattcctatttctttcttttaggtatggttatgtgttttgggttttttttttctttactttgatatttttctataacttcaatgtattttaacagcaatgggaactgtcaacatcaacttagtctgccatgatgccaagagctccacctctgaactcacatatccgtaccatatgagctaaccatgctctctgcctctccagatttactgaacgatttgacacctgaggtattatgattctatttgaagaagggggagggcatctcaagagagaaaatcaaacttctttaggcgcagagatgagaaagtacatcataattatgaaatggcctccttgtctggggtaatacccgaggttccttgcctcacagccaaggaaatcaaggacgtggatacacacagagtgaggataagagtggaagtttaataggtgaaagaaagaggatagctctctgctggagagagggttcttggagaaatgggctgccggatctgcagtgaaatggaggcagggggttagacgcctggtgaggaggtagagtctgatttacatggagcaggaaagactggctggaccaggtgtgtcattagcatagggtgtgaaaaactgattaggactagatgtgccatttgcatagggcatgaatttctggtagcccccaccctaatctttaattatgcaggtaggttctccgtctggcctgcaccacgttgcccattcccttattgtacacatgataacaaaaaaaggaagatggagcctccatgttggatatgtctggcccccaggtagccctttcctattggcacagctgccagccttcccctgtgcaggcttccggcttgcttgtctatgtctgcagctcaatttctcaggctgctctttgttagaaaaaaagtaatttattgggctgctttttgttaaaagggaagctctgccaaagactcttttactttcactatctgcctaaataatttctttctacctcctgtatcaatgagaaatgataaagatgattagacctacatccctcatacctagcacatgattcaaacatgtactacaagagatgctgagaagtgaggattgaattaattacagatctaatatatttttgagtcaatatctctttagaaaaattagtaaatgctagatattctgcagaactgtcacaagttgatcacaaaatgtaaaatggcttaaacaaagtaaaggtttatttctctcctacataatggttacaataaatgtttttgtttgggggaggttctcctgagtgtggagtactggggatacaggttcattccatcatgtgtctccatcatcctgttcagcctcctctccatttgcatccaactggcacaagggtaagaaggtgtggaggagcccagaactgggacacgtgtggaatggctagaactcagtcacatgagcacacctcactgcaagggagtctgggaaatgtagtctaattgaacgtccaagaagaagagaacaacacggatttgactaagcagctgatcgttgccgctgtaatttaagtcttagagtacaagacggatcaaagaggaggaaacctggagtcaagcagttgagttagcattacaatacttcagggagaaaacaatgatggagctgaagcactgggacatttagtagaaaggctgaattatgtaataattattttaaaggaagaatcaacaagattagatgtagaggtgagagagaaactgagtcattaagcttgtgagcatcccacatatggggagtacaagaaatatacctggatttgactcaaaaaatattaagagaaaacttattgatacatacaatagaaaatatttggctgggcacggtggctcacgcctgtaatcccagcactttgggaggccgacacgggcggatcacctgaggtcaggagtttgagaccagcctggccaatgtgatgaaacctccatctctactaaaaatacaaacaataacaacaacaacaacaaaaaactagccaggcgtagtggcacatgcctgtaatcccagctactcaggaggctgaggcaggagaatcacttgaacctgggaggcggaggttgcggtgagccgagatcacaccactgcactccagcctgggcaagatgcagtgagactccatctcaaaaaaaaaagaaaaaaaaaaaaaaagaaaatattccataatagtctatctgaaggaggtaaaaataaacaagatatggttttccttcccctaaaatcttgccctcatcttaggttggatgtgcagtttggtcacgttggcagtatgagtgaagtggaaatacggagggaaaagttcacacctacagatgtaaacctcacagtttactaagcaatggttgaagccactaagcagttgcttgagtcacccaaagaaataattaagaacaggaagagaaggctgagagaaaggcattgtgattgtatatacttgagggcttgccaaagagagaaaaaaaaccaacaactcttttttcctttcttttaaaggaaatggtgaaaatttactttgaaaatgagacacctggggagaaaattctccagactgttttagtaggatctaaatgcactggtccctgtgatttacaatcttccgacacagtgtagatacatgttacctcctgggctctgggatccctctgagttttttcaatggaaaaattcctaatttctgggctggccctttcaccagcagaccttttgcactggaatattttgtcaaagacttcaaaatgctgtcctctccttatcatgggtaataaaattagtgtgtgattttggcttctccactaagttgtaaggtccttgagaacagagaccacgtcttgaataaatagatgaataaactgtatttgtcacatatttataacttctccatgaggtctaacaaagtgactagaccatgggacatgacaattatttgttatatgattaatttctaggcgtttagtggtggtgcttggaacaggaaggatgggcacttctgattcagagattgctcactttttagacatgactataaaggggtgaatgacaattagtcctattgacctacagggatgtttccccaaaatactggatatctctataatttaataaactcaggtgtatacacagctgaatcacttaagtcagaagtgatggagaaggattatcactacacacagtaactatgctaatataatgatattcctctcccctttcatgttaaagaagccatgagggaaaataaccagtcctctacactggaattcatcctcctgggagttactggtcagcaggaacaggaagatttcttctacatcctcttcttgttcatttaccccatcacattgattggaaacctgctcatcgtcctagccatttgctctgatgttcgccttcacaaccccatgtattttctccttgccaacctctccttggttgacatcttcttctcatcggtaaccatccctaagatgctggccaaccatctcttgggcagcaaatccatctcttttgggggatgcctaacgcagatgtatttcatgatagccttgggtaacacagacagctatattttggctgcaatggcatatgatcgagctgtggccatcagccgcccacttcactacacaacaattatgagtccacggtcttgtatctggcttattgctgggtcttgggtgattggaaatgccaatgccctcccccacactctgctcacagctagtctgtccttctgtggcaaccaggaagtggccaacttctactgtgacattacccccttgctgaagttatcctgttctgacatccactttcatgtgaagatgatgtacctaggggttggcattttctctgtgccattactatgcatcattgtctcctatattcgagtcttctccacagtcttccaggttccttccaccaagggcgtgctcaaggccttctccacctgtggttcccacctcacggttgtctctttgtattatggtacagtcatgggcacgtatttccgccctttgaccaattatagcctaaaagacgcagtgatcactgtaatgtacacggcagtgaccccaatgttaaatcctttcatctacagtctgagaaatcgggacatgaaggctgccctgcggaaactcttcaacaagagaatctcctcgtaaccaatgtgagggcctacattggataccgtagtcaccagttacggtatattggaaatccagttctgatgtcatcctcctacgagaggcagtctctgatctttctagcctgaaattcctaatctcagaactcttataacattttaataagttaataataagtgattattgaaattaccactttcaactcattgctgctctttttggcagagtggcagcacagggatatagggcatatgtcctgatgagcagagtcaagttgggaagatctgagcctcagctttcacatctacatgttaggaataataagtgccctacatgggtcacatggtgtgttgattacaatagctcatgcttccaagattataaatcactattcatgtgtccatttttatttgactgttaagtttaatcacccttattaggcttgcaagcctctgagggcaggagttgtttttacacatcactgtaccttcccaatcttggtcagataaagtgcatccaataaatactggtggaagtggaatgaataagatattaatatctgaaacgtaatattataattagggataatcaaaccagacattattttctcatcctttaaacctttcaagaaactcccattcacaaatgctacaaagggaataaaatacctaggaatacagcttacaagggacatgaaggaactcttcaaggaaaactaaaacccactgctcaaggaaataagagaggacaaaaacaaatggaaaaacattccatcctcttttatacaaagaatcaatatcatgaaaatggccatactgcccaaagtaatttatagattcaatgctattcccatcaaactaccattgacattcttcacagaattagaaaacacttctttaaatttcgtatggaactaaaaaagagcccgtatatccaagacaatcataagcaaaaagaacaaagctacaggcatcatgctacttgacttcaaactatactacaaggctacagtaaccaaaacagcatggtactggtaccaaaacagacatgtagcccagtggaacagaacagagacctcacaaataacaccacacatctacaaccatctgatctttgacaaacctgacaaaaacaagaaatggggaaaggattccctatttaataaatggtgttgggaaaactggctagccatatgcagaaaaatgaaactggacccctttcttacatcttatacaaaaattaactcaagatggattaaaggcttaaacgtaagacctaaaaccataaaaaccttagaagaaaacgtaggcaataccattcaggacataggcatgggcaaacttcatgtttaaaacaccaaaagcaatggcaacaaaagccaaaattgacaaatgggatctaattaaactaaagagcttctgcacagcaaaagaaactatcatcagagtgaacaggcaacctacagaatgggagaaaatttttgccatctatccatctgacaaagggctaatatctagaatctacaaagaacttaaatttacaggaaaaaaaccaccccatgaaaaagtgggcgaaggatatgaacagacacttctcaaaagaagacatttatgcagccaataaacatatgaaaaaaagctcaacatcactggtcgttagagaaatgcaaatcaaaaccacaatgagacaccatctcatgccagttggaatggcgatcattaaaaagtaaggaaacaacatatgctggagaggatgtggagaaataggaaggtttttacactgttggtgggagtgtaaattagttcaactatcatggaagacagtgtggtgactcctcaaggatctagaaccacaaataccatttgatccagtgatcccattactgggtatatacctaaaggattataaatcattctactataaagacacatgcacaagtatatttattgtggcactgttcacagtagcaaagacttggaaccaacccaaatgcccatcaatgatagactggatgaagaaaatgtggcacatatacaccatggaatactacgcagtcataaaaaaggatgagttcatgtcctttgcagggacatggatcaagctggaaaccatcattctcagcaaactaacacaagaaaagaaaaccaaacactgcacgttctcactcataagtgtgagttaaacaatgagaacacatggacacaaggaagggcacatcacacaccagggcctgtcagcgggttgggggcaagaggagggatagcattaggagaaatacctaatgcagatgtcaggctgatggatgcagcaaaccaccatggcacgtgtatacctatgtaacaaacctgcatgttctgcacatgtaccccagaattaaaagtataataataaaaaaaagaaactgacctggggaaatatttctgtgcttacttcatagtttagactatatctaaagataatacaactcctcctaaaatcttactaagacagtcactaataaataataataataataaacaaaaacaaaagcaaagaaagaatgaccacaggattcaggataagagaaaattcaaaaggagaaatgggggaatagaactagggttatcacatagttagatgtaggttattactacagtcctaatattcagattaagtggtgagtccagggtgttcatgaaattatgattgattgatagttacatagatacatagataaaagctctgaatgaaacaatgaagagagcttctctttaatcaagaatggatagataagagagcagtaagggaggaggggagagtgatgagatcaggagtttaattacacatctcttaaagcaatctagggaagagagagtgaagatacaaaatgaatacaagactaattttgctgttacggataaactcagtaagatcaaatggaattaggtgtttattgcccatggtgaaataataagtaccaaagaggatagatactatataagaaggtatccttctttgcatctacgatccagatgcaaacgtagtgtggaaatagaaaccatagaatgaattattatgatagcaataagatgtctagaagattttgagttcgagtcactaaaaggaaaaagatgcccttaatgacagtagtgaacaaaacagcaatttaagaaaaaaaaaaaaagttccattttgggtgtgtttttagtgttccagtgactcttgtggatgtattggattaaatagtagaatgaagatacaaagctttggagcaaaattaacagaacatggatcagaggggagctgataagtcaagttttcaacaaagagacttgcagaatgactaaacttcaagaaagggagccaggatggagaatgaggattccagctggggaaggaagacacttgtacagtcaagacttgatggtcctccaagtcaaactatgtgtctctctcccttttatatcagtcaagggacatagcacagtgtattgtcctgcactactgagcactcaaatacttgctttgaaaaaaatgaaacaaggaaaagtggtaaatgctacaaaagaagttaatgtgccacgtaggttcagagaaagtagccatttcattacatatgaaatgtacatatgcatgtgggcgtgtgcatttcgtctatcacatatattattgtctctgaattttcaaaatagtcctgtggcacagatggcaatagccctccttccagatgaagaagtcacatctctcaaagatgaagtgatttagcccatgtctttcaattagaaaaatgcagatcttgtatttgagcccagttttcctcatgctgaatgctcttcctctgactccacagctggcctgtagagggaatatagaataatgaggagagatacctaaggaagccaggatttgtgcacctgcaggaaacatggctagaactttaacaagcagaggggacactccagccatggtaatggttctttttatgattcctatttatttattgctttttaagttattcccctttatcttctgttttcattcatgcttgtaggatttcaatatacatgcttagcttctcacagtccatttacagttaatatcacaccacctcatgtaaaatgtagaagctctgtatttgcataatctcatttattgctccaactgccttttgctagatgctatatatataacaactacttacactacaaaactggccatcagagaaatgcaaatcaaaaccacaatgagataccatctcacaccagttagaatggcgatcactttcttattttcaaaaattataaaattgggtttaagatattcttaattctaagaaaatagaatttacgttgacctggtggctcatgcctgttatctccgcactttgggaggctggggtaggagagctgcttgagaccaagagttcaagaccagcctgagcaacatagcaagaccccatctcttaaaaaaagtttaagtcaaaatggacacccacagaaatagaaaagatcattcgagactactgtgaacacctctatgcgcagaaactagaacatttagcagatatggataaattcctcgaagaaccttcttggaagtatattatcctccacaatatggaaatgaagtaacatatggaaatgaaacaagtttttcaattttttctactattcattgctaatttcattccattgtagcaggaaaacatactttgtattttttctagccttttaatgtcattgaggtttattttgtggtctagcatatggtctatcatagagaatgttcccatgacacttgaaaataactttcttcttttgttgttgggcagagcgttacatagacatctgttaggcgcagttaatttacagtgtggatcaagtctttatttccttgttgatcttctgtctagttgttctatccattattgaaagtggtatgttgaattctccaaatactgttgttgaattattattatatattatataatatatatattattattatatattatatatattattatatattatataatatattatatattattatatattatataatatattatatattattatatattatataatatattatataatatattattatatattatataatatattatatattattatatattatataatatattatatattattatatattatataatacattatatattattatatattatataatacattatatattattatatattatataatatatcatatatattattattattattattccccaccccacaacaggccctggtgtgtgatgttccccttcctgtgtccaagtgtgaagataatgtatggagtttttctatgtagataagttgttatcggcttcaaacagactgttgtaagaatttttatccaaacctcatggtaatcacaaggaaaaagccattgtacaatcaaaaaataagactgacagggcatggtggcatgaacctgtagtctcagccactcaggaagctgaagtgggaggatcacttgagccaaggagttggagactgcagtaagctaggatcatgccactgcaatccagcccgggcaacagaatgaaaccctgcctcttaaaataaataaataaataaaagtaacttttaaaaacaaagagaaaaggatcaaagtatatcactattttacaaaatcatcaaaccacaaagaatacaacaagagatggacatccagctttcccagcattccaagacacctgttaggatgcccactccagtctcacctcacagagatcatagtggggtaatggcaaggttaactccctgtggtcagatacaaacaaagaagggaggtgtttctctgagaaagagagaaacaaaagactgacaaaaaagacagaacacaatcacaaattgaccatagtgtttgcctatcaataattacttcaagtataagcaaattacactcattattcaaaatatatacagcagctaaatgaattaaaatacatgatccaactatgtgctttctagaagacacaaactttaaatttaaggacacaaagaaactgaaagtaaagggaagaaaaaatacattctatgcaaattgtaaccaagtgatgtggtttggctctgtgtctccacccaaatctcatttcaaattgtaaccttcatgtgtcaggggaggaacctggtgggaggtgattggatcatggtagcagattttcctcatgttgtcctcatgatagtgagttcgttctcatgagatctgattgttcagaagtgtggcacgtcccactgcccctctgtctcctgctgccaagtaagatgtaccttgcttccctttcactttctgccatgattataagtttcctgaatgcttccccagctatgcagaaatggagtcaattaaacctcttttttttatatacattatccagtctcaggtagtttttatgcagtgtgagaatggactaatacagaaaatcgttatcagtggattagggtacctctataaagatacttgaaaatgtagaagcaactttggaactgggtaacaggaagaggttggaacagtttggaggactcagaagacaggaagatgtaggaaagtttggaacttcctagagacttgttgaatagttttgaacaaaatgctgaaagtgatatggacaatgaagtccaggctgaggtggtctcagatggagatgaggaacttattgtgaactacggtaaaggtgattcttgctatgcattagcaaagacactggaggcattttgcaccaccctaaagatccgtggaactttgaacttgagagagattatttaggttatctggtggacgacatttctaagcagcaaagcattcaagatgtgacctggctgtttctaaaagcctatagtcatatgcattcacaaagagattatctgaaattggaacttatgtttaaaagagaagcagaacataaaagtgtggaaaatttgcagtctggccatgcagtagaaaagaaaaacccattttctggggagaaattcaaactggctgcagaaatttgcatatgtaacaaggagccaaatgttaatagtcaagacaatggggaaaatgtctccagggcatttcagagaccttcacagcagccccttcaatcacaggcatggaagactagaagactcaatgcagccatgggacatggcaccctgcatcccagccactccagctccagccatggctaaaaggggccaaggtaaagctcaggccattgcttcagagggtacaagtcctaaacactggtggtttccacatggtgttgggcctgcaagtatgcagaagacaagagttgaggtttgggaatctcagcctaggttccagaggatgtatggaaatgcctggatttccaggcagaagtctgtggcaaaagcagagccctcatggagaacctctactagggcaatgcagtggggctggagccccccataggagaaccgcctagtggagctgtgagaagagggccaccatcctccagcccccaaaatggtagatccaccaacagcttgcactaggtgcctggaaaagccacaggcactcaatgccagcccatgaaagaagttgcaggggctgtatgtaccctgcagagccacaggggtggagctgcccaaggccttgggagcccacctcttgcatcagtgtgccctggatgtgagacatggagtcaaaggagattattttggagatttaagatttaatggctgccctgctgggttttggacttgcatgagggctgtagccccttggttttggtcaatttctccctcttggaatgggagcatttacccaattcctatatccccattgtatcttcgaagcatcaaagtaactaacctgttttttattttacagggtagtaggcagaagggacttgccttgtcccagatgagattttggactggaacttttgaatgcctgaatgagttcagactttgggagactattgggaaggcatgattggttttgaaatgtgagaagaacatgaattttgggaggagaagggttggaataatacgatatggctctgtatcccacccaaatgttacctggaattgtaatccccacatgtcaggggagggaactggtatgaggtgattggatcacggaggcagattttccccatgctgttctcatgataatgagtgagttctcatgagatccaatggtttaaaagtgtggcacttcaccctccccttctctctctcctgctgccatgtaagatgtgccttgcttcccctttgccttccaccatgattgtaagtttcctgaggcctccccagccatgcagaattgtaagtcaatcaaagctcttccttacctagtctttacccagtctcaggtagttctttacaacagtgtcaaaacaaatacaccaagtgtgcagggtggctatacttacatcagataaaatggactttaattcaaaagctgttacaagaaacaaagaaggtcattacatagtgacaaaatggttgattccataggaatatataacaattataaatatacatgtaccaaacatcagagcacctaactatataaagcaaacattgacagattttaagggatacataaaagcagtacagtaataggagactttccataaaggatttataatctgaacagaagatcaataaggaaacaccagatctgaacaatgccataaaccaatgtatgagtcagacatgtacaaaacattccacccaacagcagcagaaaacacattcttctaaaacagacatggaacattttccaagaaaaatcacatgctaggttacaaaataattgttaacaaacttaagaagattgaaatcattctgtgtgccatttctggctattaaaaaatgaaaaatgaattcaataacaataggaaaattatagattatatgaaatttaaacactcctgaacaactattgactcaaagaagaaattaaaaagaaaattaaaaaatatttcagggaaaacaatgaaaataaacacaacatacaaaaacttacaagttgcagcaaatgcagtactaagagggaaattgacagtgagaaacttacattatgaaagaagaaagatctcaaataaacaacctaactttacacttaaggaagtaaaaaataagacattaaacccaaagttagcagaaggaagaaaatcataaagaatagagcagaaataaatgaaacagaaaataattacaaaaatagactaaagtagacattgttttttgggaaaaaatgtgaaaaaattaacaaactcttagctagaatcatttttaacataagaaatactcaaacaaaatcagaaggggtgaaatttctattatctatggccatggaaattaaagaaggtcagaaagaattattataaacaattgcaagccaattaattggacagcctataagaaactgataaatttctagaaacacacaacctttcaacctgaataagaagtagaaagcctgaacagtccaataacaaataagaagactgaatcagtaatttaaaaaacaaactttcaaacgataaaagaaacatgaacggatggattcacaggtaatttctaccaaatatctaaagaagaattaatacccaaacttcttaaattcttccaaaaataatagtaggaaacacttccaaactcatttaatgacaccagcatcactctgatacccaagccagacaaagacaccacaagaaaggaaaacacagaccaatatctcttatgaacacagattcaaatactcagtaaaatataaacaaaccaaattcaacagcacaataaaggatcatacaccacagccaagtaggatttatccctggatgcaaggttgatttgacatacacaaatcaatcaatataacataccacactaacagaatgaaggataaaaactacatgattatatccataaatgcagagaaggcatttgacaaaattcaaaaccatttcatgatgaagactctcaactaattaggtacagaagtcacttacctcaacacaataaaggccatatatgaaaagcccacagtgagcatcattctcagtaaaggataactgagagcttttcttctaagatttggaagaaagcaaggatgctatgttggcacttctattcaacataatactggaagtcctagccagatcaattaggaaacaaacaaacaaaaagacatcaactaacacaggaacggaaagccaaacaacgcatgttctcactcataagtgggagctgaacaatgagaacacgtggacacagggaggggaacatcacacaccggggcctgtcagcgcgtcggggactaggggagggatagcattagaagaaatacctaatgtagacgacgggttgttgggtgcagcaaaccaccatggcacgtgtatacctatgtaacaaatgtgcccgttctgcacttgtatcccaggacttaaagtacaataataaaaaaagaagataaaaaaagacatccaagtcagaacaaaataaaattatttataatcttatatgtagaaacccataaagacaccacaaaataaactgttagaatgaattaacaaattcaataaagttgcaggatataaaatcaatgtataaaaatcagacatatagaccttatacacacacacaaacacacacacaaatatattagtcataaaaagaagtaaatcctgctatttgtgatatggatgaacctggagaacattatactaagcaaaataagccacacaaagaaagacaaaaactgcaggacctcacctatatgtggaatctgaagacgtatagctcagagttagagagtagaaagatccttaccagaggctgggaaggatagtggtggggggagatggctaatgggtacaaaaaatcgtcagaatgaataaggcccaggacagggtgattatagtcaataataatttaattgtacgttgtaaaataactaaaagggtataattggattgtttgtaacacaaaggataaatacttgagggaacggataccccattttccatgatgtaattatgatacattgcctgcttgtatcaaagcgtctcatgtaccccataaatatatacatgtactatgaactcacaaaaattaaaaattaaagatttttttttttttgagacggagtctcgctctgtctcccaggctggagtgcagtggcgcgatctcgtctaactgcaagctccgcctcccggttttacgccattctcctgcctcagcctcccgagtagctgggactaccgtgcaccacctacgcctggctaattttttttgtattttagtagagatggggtttcaccgtgttagccaggatggtcttgaactcctgacctcatgatcggcctgcctcggccccccaaagcgctgggattacaggcgtgagccaccgcacctggcctaaagatttttttaaaagtataggtcacagaagcagactaaaagagtggttaccagaggtcaggcatggatgaattggggaagcattggtgaaagggtaaaaacttccagttatgagcaagttctggagagctaatatatagcacggtaactacagtttgttgttgttggtggtggtggtggtgttttagaggcaaggtcttgctctgtcacccaagctggagtgcagtggcaggatcatagttcactgtagcccccaactcctgggttaaagcaattctcctaccttagcctcccaagtagctaagattacaggcacacatggccatgcctaattatttattaatttctctagagatggggtctcactatgttgcctaggctggtctcaaactgctggcctcaagtaatcctcccgccctagcctcctaaagtgctaagattacaggcctgagccaccacacccagtctatagccaataatactatgttacatagtcaaaatttgcaaagagaatagatctagtgtattctcacaccaaaataacagtaactgtgtgaaatgatggatatgctaattagcttgattgtgctgatcatttacaagagatatatattacatatatcaaaacagcatatataaaccttaaataatttttatttgttagttatacctcaataaagatatgaaaaaaccatttacacaacaatgcagtatggaaaggatggtcttttcaataaatggcactgggtcagctggagattcctatttgtaggataaaaatatatcttgacctatacctcatctgacataaaaaccagttttagattgatggtaaatctaaatgtgagtggtaaaacaatacatcttttagcagaaaacataaaaaagaacattggcaaatattacttttaaaggatgcaaaaagcaataattctgaaacaaaaattgataaattggactacattaaaattaaaatcttctgtttctcaaaagccaccattagttgcataaaagccaacccacaaacttgacacatttaatctttctattaggttggggcaaaagtaattacggtttttgccattaaaagcaatggcaaaaaccgcagtcacttttgccccaactaatacaagcatttgcgaagactcacaaaacatgtaaggaaatacaaaccaacataaaaagataacctgatagaaaaataagcaaaatacttgaatgggtaatttacacaagaagatacatggtagacagatgacaaagagagatgatagatagacaaacagccatgtaagaaagtacttaaccgcattactcaacatgaaaatacaaattataaccataaacaataccactacacacacaccaaaatatcttcagataccaacttataggagatatacctaatgctaaatgacgagttaatgggtgcagcacaccagcatggcacacgtatacatatgtaactaacctgcacattgtgcacatgtaccctaaaacttacaagtataataataaaaaaaaaatttggagcaaccagaaccctcatacactgcgcggggaaattaaaatggagacacgtgtttggaaaactgtttagccctgttgactacacaaaagtctgccctaggttacagaaattcaaagccaggtatgtatttccaacagaaacgtgcatctgcccttttcagaacacgcccaactggctactaatgtctatcaatggttaaatgcatttattaaatggtacattcacacaatacaatgttaaacagcaataaatatgagcaataatatacaaccacatacaacagtgtggctgaatcacacatatataaggttgagtgaaagaagcagatacaaaagagaacaaactgtatgatttaatgtaaagtacaaaaatgaataaagctaatttatgctattaggagtcaagatactgattacccgcgtaggaacagggactacagaggaaaatgaggtgacttctggagggccagtaatgtgttttcatctgagtgctggttactcattatgactgttccatttgtaaaagtcgctgacaacattttcaggtttcattttattttctaagacaccataagcatgactgttttaatctgtgtctaataattatattatctggagtccctatatgcctcccatctgctggttcttgctgttggaatccttcatccttgtgtgtcttatcttcagatgtatgttggatattgtgcttgaaaaagtattaagagaagtaatttgagctcaagggggcattgttcctccgaataggatttttttttcaattgcttttgcttaaaacttggggtcactagaagtctagatcatcctaatcgaagtttagtacttcagattttccagacctctgataagtcaaagccaggctgcaatatgtatgagatctgctttatccctgactgactcccagcgtgtgttttaggattgctgcacagtaaggagctggtttacttctcgtaaacaagactcatttctcaaggtccttgcctctagataataacattggagcaattatccatgttcatctcaagaggctaccttgggattgtatctccagggccgctccaaaactgataaggtctgatacagtccctgtttagtcctttccatcgtgaatctgggatcccaacatcagttctcaaatccccccaggctcatcagggcataaagagcctcaaattctgtctcctcttttgcagggactgaagatgcaggtaacaagttctctgctctttacatttagcaaataggacaagtcagcaagttctattcaggaaataatgcattgtagtctcttatgtccttactgaattttcatcctgtagagcaggaacgtggaggcagccgaaccagtgaactctgagagcagcacagagcagtgggtaaggtgcgtccgcctcaggctcatgctccttctccctcttccctcttatcttctcctccattttctctcatatttgtgggataaaaaatatatcttgacctatacctcacctgatacaaaaatcagttttaaattgatagtgaatctaaatgtgaatagtaaaacaataaatcttttagcagaaaatataaaaaaggacattggcaaagatttagcaaagatttcttttaaaggatgcaaaaagcaaacatactcacatcttcataatctaactgctaagggtttaaggtaagataacaattcctccaatccttttggcactctgcagttttcacgggctcactggcacccgccctgctgcctgtgattctcacaacctacaagaatgcccacatggtggctctgggggactgactgcccaactcaaagtcctacagctggggagcaacagaggcggcacaaaggccagtgtcccaacagcaagcttgcagcacttttctgtaacacacgcacactcgctgtcctctcccccaggccgcgctacgtaggagtttgtgtctctacggccttcacaccgcacgagcgttcagaacccgctgactcttctgggctgagagcagtgtttcccaaagcataggatcagaatcactcggggctcactaaaaagaacttggtcctcagaacagaaccagcacctccgagaaggggcgggaaaatcagctttttgtcttggagcatcgcaggtgatcctagtgctcactgcagcgtgggagatgatacctttagggcgggcgagcagaggtgtccagtcctctgggcagccttggttttctgaagtcccatcacctccctcctaccttctctcctgttgggaagatgtcccacccagaaggcgggaaggaagtagtttcttctggggtctaagaaggtggaagccgtttctctccatggcagaaacagaggtggtgggcgagtgtgctcaggattggggccctgcagggaatcaccacggtgctgcttttcatgctcaggtcacgtaggggccttggggtgatctcagggatgagcccatcagctccctctttctcattgtaaccgcttttctaagaggcaagcagagctttggtcatgggctcatctctgccgtcaaatcgctctgactttgcgcagatctcttcggatcaaggctgcacgttaagttctggagtgtgggaaataaacgggctcgtttgtgcttagagccgtaagacaactaacagataagagatgtgggaagctgtagatacaaagagtctccggagcatgtgctcagggttactcccactttcactgaaatgccagaggaccactccatcatgaatgtgtaatttggaaccttattgctaaaaaaggccttaaccagcacttacttccactaaatgctccaattggctctgaaacgatcactcagcccatggcatcgtgcagcctgttctagtcccttctgtgacggggagttcacctccttcccagtgcccttcgctggcccagtacttaagtcttctgggtgacagcctggctcctatttttctctctctctctctttgccccctggtttctgaccgaggcagtgcttatccctttgtatgggaagcccatcataacatgtcccccatctgtctcccatgtagctgcaccaagtgtccggacacgattacgtcccaaccctgacatcctggaccactccctgcagaccccagggtggactgagggatcccagggtgcctgagtagggggcagaaccaggtccaggatggagaacagtttcctgctggagtgggctgggagacagaagctggaggaaatggttaaacaggactccctttgccatccccataacagcacctcccatttaaaatcagctttcaagctagagaactccttccacattcaggatttcagctcttaacgttgcataaagtagacattattgctgtcctttaacacgcggtcgagtagttggggcatcagctttgagtcagtaaagagggttaaatactgaccccattcttttacaagctgagtaactgtaaaaagattattgctcttctaattcttggtggaatcatctctcatagagccaaatagttccgcgtgtgggataaataaaagaccttaatatagataaggcacgtaagcacattctctgtccaagtgctcagaaatgaggagttatttgccgggggtgggtggagtggggggaaacgttgtatgcgttaatctaggatttgaatccacacttctgcctcaaactttcctttcagtataccactgaccctagatatcagggaaatcaaatctgtaaattgagatttaaaagtccattcatggctgggcacagtggctgacacctgtaatcccagcactgtgggaggctgaggtgggaggatcacgtgaggcctggagttcgagaccaacctgaccaacatgttgaaaccctgtttctactaaaaatacaaaaattagctggacatggtagtgggcgcctgtagtcccagctagtcagcaggctgaggcaggagaattgtttgaatctgggaggcagaggttgcagtgagccgagatcacgccactgcactacagcctgggtgacagagcgagactctgtcaaaaaaataaaataaaataaaattaaaattaaaaaaacacattcatttgctaaatgcttgcctgccccatcctacctccactaaagcttgtagctccaacttactttaaccttctacattgctcacagtccccacatcaacattttcttacccagctgctacttcaaatttatcctgttcaagactgaatttgcagaacgtgctccacattgccctggcatcagctagttccctaagcaaccacattttcatcgatacataggcgccaggtctcatgactcttgtccattcatttatgtcaaatgcatgaaatgtctactattctatacagtttagttcaaccttgttttactgatctctacattatgcctggcattgtgcaagatcctgaggatgcaggaattcagagtaatgtccctacccttgagactctctcagtcttgcagagaatggatagttaagcaaaatgtgcaaagggtcaatccgaaaaagaatacaaaggcccaaaacagtgcagaaactggagtggttacctctggggtgggagatgtcaggaggaggagacgcttaagcaggtgctagagcaggtcttaccaggctgacaattgaaggaaaaaaattcagtctggaaaagcagaatgaagaaagcatatttggtgaaaaggaacaatcagtatgaaggacagagacaaaatattttgtgtattctagaaccatacaaactgcaaaggcactgctagagtagagagtgaaggtcaggcaagcaggagagtccactggggctgaagcatcctgggccttgaccgcctggccataaacttgagctattgtgggggaaatggggagcctcagctaccgtagggaaaatacacgataaatttgtccggaagcatgcttcatgctcaggcagaggtgagcactctacctcggctttcctggtatgttcctgtggttgttcttggagcaaaagctcacgatgggagtctccaaaggctgctctgtccgtccaagtgggaactgcaagttagtcctgcctcctatccaccatttttcctacactccccgagtcccttaagttttggaaagttgtatcttcactttcatttatcttttgtttctgttgcttctttgattcattggttattttggaggatggtgtttgattaccaaaaatatgtgagttttctccattttttcttctttccatcgcaaatttcattcctttgtaattgaagtacacactttgtgttatttccatctgttgaatatcattgaggtttgttttatgcccttgcatatggtctgtctgggggaatattccaaggatggctgaaaagaatcttgttctattttgaggtgcagttttctatagatatctgttagggatactccatttgacatctctgtgtaacattttggtaattctcacaacatttcaaactttgtcatcatgattacatctgttatgctcatctgtggccagtgatctttgacgtaaccattgccattatttgggggtgccatggaccacacccacataagaagtaggacggaatcggtaaatgtcttgtgtgttctgactgctgatcagcgattcctccatctctgatcagccattcctccgtctctctccctttcctcagacctccttattctcagacatatcagtattgaaattaggccagttagtaactctacaaaggcctctaggtgtacaagtgaaaggagagtcacatgcctctcactttaaatcaaaagccagaaatgattaagctggttgaaaaagacaatcgaaagcagagataggccaacagctagacctcttgtacaaaacagttagccaaattgtcaatgcaaaggaaaagttcttgaaggaaattaaaaagtgctactctactgcacacacaaatgacaagagagtgaaacagacttctagctgatatggagaaagttttagtggtctggatagaagctcaaacccgcaataacattcccttaggccaaggtctaatacagagcaagttcctaattctcttcagttctgcagaggctgagacaactaagaaagctgcagaagaaaatgtgaagctagaaaaagttggctcctaaggttaaaggaaagcagccctctccataacataaaagtgcaaggtgaagcagaaagtgatgatgtagaagctgcaacgagttatccagaagatctagatgagataactgacgatggtgagtacattaaacaacagattttcaatgtaaacaaatctgctttctcctggaaaaagatgtcatctaggactttcatagctagagaagagaagtcaatgcctggcttcaaagtttcaaagacaggctgattctcttgttatgagcgaatacagctggtgactaagttgaagccagtactcactaaccatttcaaaactcttagggcccttaagaattaggctaaatctattctgcttgtgctctataaatgcaacaacaaagcctgaatgacagcacatctgtttataacatggtttactgagtatcttaagccactgttgagatctactactcagaaaataatattcctttcaaagtattatgttcatggtcacccaagcactctgatgacaatgtgcaagaaggttgatgctgttttcatgtctctagcacaatatccattctgcagcccagggatcaaggagtaatttttactttcaagacttatgattatataagaaacacattttgtaaggctacagatgccatagatagtgattcctctgatggatctgggcaaagtaagggaaagcttggaaaggattcaccattgtagatgccattaagaaattcatgattcatgggaggaggtcaaaatatcaacattaataggagttgggaaaagttgattccaatgctcatggatgaatttgaggagttcgagacttcgctgggaggaagagttccgtaactgcaggtgtgatggaaagagcagagaacagaattagaagtggagcctgaagatgtgactgaagagctacaatctcgtaataaaacttggaccgatgagtagttgcttcttacggatgagcaaagaaagcagtttctcgagatgaacaccactgctggtgaagatgctgtgaacacggttgaaatgacaacaaagaatacagcatagacatgaacttatttgataaggcagtggcagagtttgagaggatggcctccaattttgaaagaagttctactgtaggtaaaatgttgtcaggcagcatcgcatgctacagagaaatgtttcctaaagggaagagtcaactgatatggccaactttatcgttcttgtttgaagaaattgccaaagccaccccaaacttcagcaaccaccacactggtaagtcagcagccgtcagcatcaaggtgagatcttccaccagcaaaaggattataacttgctgaagggtcaggtgattgctatcatttctcagcaataaggtatttttaattaaggaatgtacatttttagacataatgctcctgcacacttaatagcctacagtatagtgtcaacgtaacacgtatacactgggaagccacaacactgtgtgatgcgctttattgcaatatttgctctattgaggtgatctggaatcaaactcacaatatctccaaggtacgcctgtagctgggttgtttttttttaaatattaagatttaaaaactatcatgcagctcacacctgtaatcccagcacttcgggaggccaaagcaggtggagcacttgaggtcaggagttcaagaccagcctggccaacatggtgaaaccccttctccactaaaagtacaaaaattagctgggcatggtcgtgggcgcctatagtcccacctactcgggaggctgaggctggagaatcacttaaagccgggaggcagaggttgcaatgagccgagattgtgccactgcagtccggcctgggtgacagcaagagactccatctcggaaaaaaacaactatcatgcaggctgaaaaataaggtccctgaacaacaacaacaacaaaaatagctaatgacaatattgacttggaggaagttccccatcacattgctgagtgaataaagatgactgaatgaatcaaacggaaagtatcttcaccaaagtgtaaacagtggctgctctgacagaatttggggcgacttttacttattgtataaattttttggtattgctttaattgttcacgttggaaattttttgtctataatcaatagattacaatatagttttttagagccatttttttgagacagggtcttgctctgttgcccaggctggagggcagtggcacaatcgtggctcactgcagcctcggcctcccaggctcaggtgatcctaccacctcagcctcccaagtagctgggactacaggcatctgcagccacacccagttaattttgtatttttagtagagatggggttttgccatgttgcccaggctgggtctggaactcctgggccctaatgatatgcatacctctgcctcccaaagtgctgggattacaggcatgagtcactgcaccctgctgaagctatttttatttagaaaaagaattccaaggccaggctcagtggctcatgactataatcaaaccactttgggaagacaaggcagaaggattgctggaggccaggagttggagaccagcctggacaacatagcgagaccctgtttctacagaaaaaaattaaatcagccagccatggtgacacacgcctgtggtcttagctactcgggaggctgaggtgggaggatggcttgagctcaggagttcaaggctacagtgagctgtgatgacactgctgtactccaggctgggcaacagagtgagacccaatctctaaataaataaatgtatacaaaaagaattcgacaaaatatttttaaaatttctcttgtaagccattaaagaaattgcaggaaattttaaatgttagacttgacaataagtgaatacaagtttagtatggactctgatgcaagccaaattgtactaaaaaggcagataccaaaaaagaccgtagacaaacttcacgaataattgtgactacaaaagtctaaataaaatattagcaaattgattcagtggttcataatgggcatacaagtatgcttccatattaagaaggctattcacataatgtatcttgagtgacactgaaaaagtgttttattaaaaatgcaacagccatacctgattttttaaatactgttgataaactatgaagaaaaacaatagttgctaaatatgcacagccacttctgctttacagttcattactggccattgcacaacatcctgtctcaccaatatcctctttgctcccagacatgctggcctatatttacttccttaaacacaagaacgacctttccctgctcaggggctctgctcagggtggctgtttttctgcaaagctctttgcctattgtgttacaagactggctttttgtggtccttcatgtctcggctaaaaagacattagccatggttatctaactctacatgctggaatttgatacaatttttattatctcctttataacttttcagatttttaatgttttattccatatacattcagttttcaaaaggaaaaaataattttttaatctttagtatattttgataaaatatactagtatgtttggtatgttttagtatgtttgataaaatacaaaacattgatgtaacttttcccaaaaaataagtagacagttgtcctaatgtcatttattgcataatgcaacctttccctggtgaattaaagtgtcacattccacatgaacttggctgtttcttaagtttctagacagttctactgatctgttcattctagcaccagtacccccactattttaaagttcttaatagagcaagtgtctccttgtcttcaacattttcctagcttattttcattcctattttataggaaatttaaactagctcttgtttctttaaaaccctgttacaattttgactttcaaataggttaaattttagaacaactcagaatatgcacctttgcaacatctcatcttttttatctagaatcttggttatatctgtccatttaataaatttttactttatgcctcaatagagaatttgaagaccatacctgattcttattaatatcttaatgcatagattgtttgctgataatgtgtttcatattttaatcttagtattcttatcattcatatataataacaggtactatttattgagtgctctccacatgtcagctctttgtgttaagtactttattccttaattttctcctcaccccaacccatttttcacatttaaaaaacctgagtcttaaagaacacaagtgacctgcctgaggcattacagccaagaagaggcagtgctttgacttgaatttaagagttcgggatcaatagatgcccaaacgtcagcatctctcaatatatccttgtaacaaatctgcacatgcacccccaaatctaaaattaaaattaaaaaaaaaaaaaaaaagagttcccacaggacggtctttagcactgcactacgtggcttacggggaccatgaaagctgagagcctgttcattttgtcatgggtcacttcactgactaatcacagacatcttttttttctaatgatgtttccactcattttcttagatttcccagagagatcattatatcaacaagtaataataattcttctttctcctttccaatattttatttctccacttcctccaattggacaataatcttttcttgtaatgcatatacctgtattaaataccacttaaaaccctgtataaaatcataacataacacactaaactttaaacacttcaagactattggaagatggcaggattaaaaataaggcttagacattgtttttataatattcattatgtcaggtgagaagttgctggaataaataagttgcatactttccatattctatttttgtgcctataatgacctgttgcttttattatttttaaagtttagtccaagatattttaattctaagaaaagagttgattttgcttatcttcgtgtccttattcaaatgagggcacttaataaacatttgttggtgttaatgttacagaaagttgggggaatggatggagataaccagagtgagaactcacagttccttctcctggggatctcagagagtcctgagcagcagcagatcctgttttggatgttcctgtccatgtacctggtcacggtgctgggaaatgtgctcatcatcctggccatcagctctgattcccacctgcacacccccatgtacttcttcctggccaacctctccttcactgacctcttctttgtcaccaacacaatccccaagatgctggtgaacttccagtcccagaacaaagccatctcctatgcagggtgtctgacacagctctacttcctggtctccttggtgaccctggacaacctcatcctggccgtgatggcgtatgatcgctatgtggccatctgctgccccctccactatgtcacagccatgagccctgggctctgtgtcttgctcctctccttgtgttgggggctgtctgttctctatggcctcctcctcaccttcctcctgaccagggtgaccttctgtgggccttgagagatccactacctcttctgtgacatgtacatcctgctgtggctggcatgttccaacacccacatcattcacacagtgttgattgccactggctgcttcatcttcctcacccccttagggttcatgaccacatcctatgtacgtattgtcagaaccatccttcaaatgccctcagcctctaagaaatacaaaaccttctctacctgtgcctcccatttgggtgtggtctccctcttttatgggatgcttgctatggtgtacctgcagcccctccatacctactccatgaaggactcagtagccacagtgatgtatgctgtgctgacacctatgatgaaccctttcatctacaggctgaggaacaaagacatgcatggggctccgggaagagtcctatggagaccctttcagaggcctaaatgaaggtaattttggaaaggggattgaagtggagaccggaaatatccttctccacacataaggcattatgctttgggatatgcaacagtcagagtacagctccagatcaggatgagcatatctacctgtggtgaagaaaagacacaatgtgtatcccagtgcctcccagacctcaccagccttggcaataaataatgtcatgctaacactactaccaggattttacagggtcaaatatttaaacctgcttgatcataggcccacagtcctaggcttatctatatatacacagtcatagcttagggagggctctcatgttttctagcacccattcacttatgacccagaggtttggcttctctaaggagcctgctatcttcaagctctttagagaagacactttgcactacccctaccacagatgccctgggtgaggcttcccctttcttgatgttctaacaggtacaacacgcaccacttcaatgttgacatatagtcactctggacacagctcatatggttcatgcagaaatgccaacaagattcctcttgtgctctgggttgattttatctttggggcctcaaagcaacactctcttgccttttccctgcattccttttctctgtaggaagtcagaccttgcccttggaaagaccatcctatcttttatttctgtagttcctcaccttccttctctttatgcaagaattccatccacccctgaaaacaaaactctcaaacataaatgcatattcataaatagcagtggtagtatggccagtagaaggggaggattctggaacaaatgaacaatttagtgatcccagagaacatagaggaaaggagatattttaataaataaattgggaatcgaactcaataaaatataaaacaaaaatacaatgaagaggattttaaaagccaaagataggttcttttaaaataaaatgaagtgaacaaacccctggaacattgagcaaagaaagaaaagacatgagtaaagactacagtgggaagaatggtggtaaaaactaaagataacatcaagattagggtgatgaagagggaatatcatcaacatctacatgccaataattttgaacattttgacaaaataaataaatccttgaaaaaaatgtgacttttcaaagctgactcaagaagaaatggaaaaattaaatagtcctataactagaatttaagcaatcattttaaatattcatatatatatgaatatgtacacatcacaaatataaatccattgataagcaacttttacgaagttacgaatcatccagttttttttaaaaaaaatttgcagagaatagaaaaagaaataaaacttcccaaatagttttatgtcataattatcacctgatatcaaagcagaaaaagaggacaagaaaaagtgcaagagctaatttcacttaaaaatataaatacaggtatcccaaagaaaatactagtaaattgaatccaacagagaatttaaaaataataatactgcataagtacccattaggatatttcaaaggtatataaagataatttgatactttttaatccataagtgtttattatattgacaaataaaaagaaaaaatcaacatgtcaatagatgcagagacagacaaaattcttaacaaatgttgtccttgataaagcaataaatttttattaaatcacatcttttcatgtatgtctttttaatattttgtataatataatggctagtaccagagagcacttctgcatctcagagtacaatgattgtcttgtgaggaagtacttgaatgattgaatttgggctcaaccagccatttcatggaacattatttttatttgttagaattactgataaactatagttattcagaattggtatttggcaggcgttgccacaaaataaatgaagtgagcctgtcgctgtaagaaaaactgacagtatttgttgccagtaataaatatttggtctatcaagcaatctcacccctttggaaaattcgtccatcatggtgatggatatatatttcatatatatatgaaatgtgtcaacactggaagatctgtataactcagtgagccagtatttttcaaatgaccaatgcattatgtgaaaaagttacacataaataaaagattaacttaaaatgcaaaagaagccaatggattttaatgacataggggataaaatgtctattcatgtgttatcagattctgcattgctactaacctttaagaaactaccacttatcatgttttgatgtagtatcaaataatattaattgaaaaggttattaacataatcctcccttttgcaattacacatctgtataaggctggattttcttcatacatgtcaaccaaaataacatatcactacaaataaatgcagaagctgatacaggaatctagctcccttgtgttaagccagacattaaaaagattggaaaaaaagtaaaaccatgctattcttcaataaatttttttaaaaaatatagttatttctatttaaaatcctactataaaaacatgtcatggtaatattattgttttatgagggaattagtaaataaatattttaaatgtctttctaatatgagaatatcagtagataaaacccatataaacacagctcatggctcttttggtcccaaaaattttaagcaggtaaatgcatcctgaaaccaaaagtttgagaactgttctcctaaagtacaaacatacttgaaaattgttctcaaattcggaaatcaattcctttgaaaaggagaacaaaatgagggaaaggaatagggataatgctttagtgttaactataatattttaaatcttttttacagaaagaagtgacatgatcaggtaacaaattaatatttttaattttgtggatggtatatatgtgtctaaaattattttattttattatatgcttgaaatatgccgctaaagaaaatgtaacacttatttttaaccctaaaatatttattaagtagtattaaattcctttgttattttcaaactcatatttttaatggttctttaacaaattagttatttaaaacatatagccttatatgtgctggcaatgccaacagataacacataaattccagcagataaggttacaaatagaacacactttcaaattaccttcctcttttcgtgatcaaagactataaaacgtcatatacttactgaccattccttctcaatattgataatagaatcagaaatagtctcttgttttattttcataaatactttaggaagacattgaggctttaacatttttaatttggatgatgtttacattgtacaagtatatgacataaaatcattttcaggtagagtttaagtaacttgaaatcaaagctgagctgaaagggaagtgactctgtttcacccacactatctaaaggctgatattgttcccgtttcctagctgaactgtttgctctttcatagaaaatggaactatgcagaaattgtatttaaaaatgtatattgcaaatttataaagggaggataggacagaagaccactatgggaagaaaaaactgtaacagagaatcagaatgcaaaaacccagaaaaaaaactcagtacttaaaaattataatacatcttttaccacagtaattatataaactaaaattagaatctaatttttgcctaattataccttataagacacaagtataattgaatttatgccatggttaagtgctattctaccttacactacatcatctacactattgcgaagcacttactcccaattttaactgtatgtgaaaggaataaaagtcttcagccatctaggcatgcaatctttctcaattgagtgagttaaatggtacctggaaaagggtttgatacggtgtcaaaatatgagatataaaaagatagcttatatctgtgaggtttttattatgccactgaattaataaagactttaaagaatgaatcagactttaaaactcatctattcatggatctgtagagacaaaagtcatggttatttctaaccaaaattagctgaagcattatttctattacttttctattatgctcactggtgtcaagaaaggaaggaaatcatatttctgacatctgccagattacaggactttcaaatgtttctcattgagtcctttaaacaatcttatgaacaaggttttgttatttttattttacaaatgaggaaacagatacataagcaattttcctaagtaaatcacagggcagttattcaaattcatttagtttaagaaaatgttatggcaaaaatgctgagaaagtgtgacggaaagaaaattataagatttttatgtaattttttcaaaatctgtgagtcattttcagaatataaaccacactgcctaaatcagggtcaatagttgatttactcttcataatgtatacatctgacaaaggactaatatccagaatttacaacaaactcaaacaaatcaataagaataaaacaaacaatcccatcaaaaagtgggctaaggacatgaatagacaattctaagaagataaactaattgtcatcaaacatttgaaaaaatgctcaacttcactaatgatcagggagatgcaaatcaaaaccacaatgtgacaccactgtactcctgcaaaaagcagccataatcaaaaaattatcatactcctgcaagaatgtccataatcaaaaaatagaaaaacaggagatgttggcatggatgcagtgatcagggaacacttctacactgctggtgggattgtaagctagtacagccaccatggaaaacagtgtggagtttccttaaagaactaaaaatagaactaccatttgatccagcaatccactactgggtatctatccagaggaaaagaagtcattatttgaaaaatgtacttgcacactcatgtttatagcaacacaattcacaaatgcaaaatcgtggaaccaacccaaatgcccattgatcaacgaatgggtaaagaaactatggcatatatataatggaatactactcagccataaaaaggaatgaattaatagcatttgcaatgacctggatgagactggagactattattctaagtgaagtaactcaagaatggaaaaccaaagatcatgtgttctcaatgatatgtgggagctaagctatgaggacacaaagccataaaaatgatataatggattttggagacttggggagaagactgggaggggggcgagggataaaagacaacaaatatgatgcagtgtatactgcttggatgatgggtgcacaaggatctcataaatctccactaaagaacttactcatgtaaccaaatacacctgtaccccaacgacaacgacttatggaaaataaaataataaaatagttgatttacaaagcaaaaaaaaagaaaaaaaaaagaaattattcatagttacttttttagtttttaaaggatctgaagctttggtttgccattgggtttgaaactggatgaatgattagatgtggaaaacacatttgtcttagtcaattagggatgttataacaaataccatacactgggtggcttaaacaacagattgattttctcacacttgtggaagctaggagtcactatcaggatgccagcatggttgggttctggtaagacttcttcctagcttgtaggcagccaccatcttgctgtgtgctcacatgacctcttctttgtgtatgcaacgagagaaaggaaaagcactggtctcctcctcttcttataagagcactaatcccattatggggctcaccatcatgagctcctctaaacccagttacctcccaaaggtactatcacatggggcagtagagcttcgacatatggatttggcagggacacaaacattcagtccataacaatacttctttcccctctaaacacatagaaaatctgaatcatatattttttattaaaaattggtcaagaagagaatgacataagcaagatggcagaataggagttctccactttcactcccccacacagaaatccaactagaagcacccacaatcaagaataccatcctaacacaaggacaccgggagaggaatgacacacactgggtcctgttgggggagtgggggcggtggagggagagaatcgggataaagagctaatgcatgcagggcttagtacctcagtgatgggttgacaggtgcagcaaaacaccatggcacatgtttacctacgtaacaaatctgcacatcctgcacatgtatcctggaacttcaaatttttagaaaaacatcttgaacattccaggaattgggactgaggctgagacaccaccctgggccacacaactgagaagagccatcatcaaagagtaacagaaattgttccctgaccatttcacccgccccaaagtcagcaccacaccacacagagaatgttctagacccacagtttctacaataagaaaagtgaattggaagcggatactcagtttccccttcattctgggatcctttgcaggaggaggcaagctcatgcttgtctcatcccaggggacacagagagagcgcaggcagagtgagaccacctggggtcagttagaaacaaagaatgaaggtaggacttaaagtagccagcacacagatcttgggaattgctctgtattctggccaatagaggtgccacaccagaagaaactagtcgacaacatcgtgctgtaggaaacattgtccataggcctttcaggctcaaatcctgagccacctttcccacacaacccagttgctttcattagtcttccccaggttgagaggcaactgcatgtcagcaattacctgtaaaatgaccatctggacttgcccaactttacttcctgggatgcaaggctggttcaacatacacaaatcaatcaatgtgatttatcacataaacagaattaaaagcaaaaaccatatgatcatctcaatagaaacagaaacaggttttggtaaaatccagcatcccttcatgataaaactcctcaacagagtaggcatccaaggaacatacctcaaaataataagagccatctatgacaaacccacagccaacatcatactgaatggacaaaagctggagccattccccttgagacctggaacaaaacaaggatgcccactgtcaccaccctattcaacatagtactggaaggcctagccacagcgatcaggcaagagaaataaaaggcctccaaataagaaaagaataggtcaaactattgaaaagtgggacctaattacctaaagatcatctacacagcaaaagaaactatcgaaagagtaaacagacaacctgcagaacgggagaaaatatttgcaaactgtgcatctgacaaaggtctaatatccagtatttgtaaggaacttaaataaacaagcaaaaaataaccacatttaaaaaatgggcaaaggaaaagacacttctcaagggaagggacaggattggacaacaaacatatgaaaaaaaatgctcatcactaatcatcagagaaatgcaaatcaaaaccacagtgagacaccatctcacaccagtcagaatggctattaataaaaagtccaaaaaaagcagatgctggcaaggctgtggagaaaagggagggaacgcttatatgctgatggtgggaatgtaaattagttcagcaactgtgaagagcagtttggagatttctcaaagaacttacaacagaactaccatttgactcagcatttccattaccgggtatataaatcattctaccataaggacatatatatgcatatgtccatcacaatgcgattcacaacagcaaagacacggattcaactttggtgcccatcagtcgttgactggataaagaaaatgcttatatataccatggaatattatgcagtcataaaaaagaaggaagtcacatcctttccaacaacatggatggagctgaaggccaaaatcctaagcaaactaactcaggaacagaaaaccaaataccacatgttttcacttataagtgggagctaaacattgaagacacatggacacaaacaggagaacaacagaaactgcagactaatggtgagggaggaggggagggaggcatgggttgaaaaactacctgtttggtactatgctctctggctgggtgcaatatacacatgcaacaaacctgcatatgtaccctcaatattgaaaattttttaaaataaaatttttaataaacaaaaacaaaccattccatataaaaccacaaaagaccccaatagccaaaaataaacttcagccaaaagaacaaagctgaaggcatcacactctctgatttcaaaacatattaacatattataaaacaattttaatcaaaatactatggtactggcataaaaacagaaacatctatacatgaatagtgaactatctgaaaaaaaaatggagaaaccataccatttacaatagctaccaaaaccaaagatcccttggagtacatttaaccaaagagatgaaagatctctaaaataaaaactataaaacattgaagaaaaaattgaaaagagaatagtaaatgagaaaatattccctgttcatggattgaaagaattaccattactaaaatgtccatgttactcaaagcaatctacaaaggcataaaaatccatatcaaaatagcaatgatgttctttatagatatatgaactgatgtttctttagatgacatacaaatggccaataggtacatgaaaatatgctcagcatcactaatcattagaaaaatgtacatcaaaatcaccatgaggtatcatttcatgcttgttagaacagccttcaccataaagatgaatgacgagtatcggaggatgtggagaaaaggtaacttttaagcattgttggtgggaatgtaaattagtataacaattatggaagatggtatggaggttctttaaaaactaaaaatcgaaccactgctgggcacagttgctcgtgcctgtaatcccaacactttaggaggatgaggcacgaggatcacttacagccaggagtttgacaccagcctgggcaacatggtgataccccatctctacaaacacaaaatttaaaaagctagctgggcatggtggcacacacctgtagtcctagctcctggggaggttaaggcaagaggatctcttgagcccaggagggcaaggctgcagtgagctatgactgtgcgactgcactccagcctgggcggaagagtgagaccttgcctctaaaaaaattacttttttaaaatgaagctaccatgtttcagtaatcccaattctaggtatgtacccaaaggaaatgaagtcagtatgttgaaggcatatctgctctcccgtgttcatcacagctcctgctccagaatcacaactaccatgtcaggtagtcctgggtccctttctgctctggaatccatcacttctgggtaccaaatacacttctgtatacaatactgtacccaccaactacagcagtactctctaagcaaagggaggagggagagaacaaagaagcaagccaagcccagcaacaaggagccaggtaggagatattccctgagctgggtttgaagggacaggaaaaacagaaattttgttgaccaaagaaaaaaaattgagaagaaaagttgaggcaaagggaatagcacacatgaaagcacagggatttgaaacagggtgtgtgcggggagtgatggggagtctggtataaataagagcggcggcagtgacgctatccaggcagtgtcacaggccaggggctccagaagcaagtatgagaaagagtttggagtgaaaagtgtttactagggaacaacacctgtgaaggaacaagggaaggagattgattgggcagaggaggaagtcaaattgcaggctgacctcccagaaagccgattatctcagcacattttctgcttctataacaaaatacctgaaactgggcaatttataaaaaacagaaaataatttctcacagttctggaggctgggaaatccaaaccaagctgccagctagtgaggacctggtctctgcatccccttgggggacaagaacaccgcaccttcacatggggaaaggtgaaagagcaagaaagccacacactgcatgaagcctcttttataaagggtcttatcccattcacgtgggaggagcctcgtggcctaatcacctcttaaaggccccacctcataatactatcgcactggctatgaagtttcaacgcatgacttttggaaaggacactttcacaccgtagcaccaacccagcagggagatttggaatgactgttggccatcggagctgtcccatatcaggttaaaatggacagtctttatacccctgcctcaatcaccaggtcctcaatcaccaggtgtgggctatccaggaaaagggactgccttggggaaggaggctctctgcagctacggtaaaccctaaaggaggtgacagctgaaggctgtctgctgaccacactcctcacagctgggcagcaagtctgtctttgaagggagaactgttcttgaagatcatctccatgtgtccacagacacgtgtgagcaatgtcattgagggcccctatggctagttaaggagcttggattgtatgcaatagacaatagagagtccatgaaaagtctcaggcatggaaatgacacacccagctttgtgttaagtggcattgtcaacaatgcgtgtgaaacagggctgaagggtgaagtcagggagatcagttaggagactgctaaattggccaaagtgaggggaagcacctgaagaggcagtaacagaagcataaaggagaggaaggatcagagaggaatttaggaggtaaaacttgcaagagggaagccgacactgtgtatttttggaagggaaatcacagtatcaaacattcaaaagcagaacctctcagcatctaccctcgcccttcccagccagcatgcacctgattagacattctggttttgttcaccagttttcccagtatctgggtcaattgtttcatacatagtaaatgcttgataaatacttgttgaatgaatgatggatgagtaagaggaccgaggccacagtcaactgacacaagatgtggctgccacttcctgactgtaagccttcagaagccatatcaaattatagtctctacactcacacaaacatgcaaggtgaaatgcaatacaaggaaagggctgccacggaagcacagcctagctttgctttaacagcagctgaagaatgaaggcacacgcaccctctggtgcagcagagaccgtggagtgaaacaacttgtcattttcagtggagcccaggcctttctcgtccattccaaggccacaggacacactgcctggcctgcaattcctccaccaccaggcaagcaacccacttagctatgggccaaaaacatcttggtagcctaagaatctctctctcacacacacacacacacacacacacacacacacacactcacacacacagaatccagatctcagctcttaagagaatgactagaagtgcatattttgaggacacccagcagtggtacctaagatgccatttgactgaaaaaaaaaaaattcaaaacctcatcctacttaacccatattattactaagtactcattgatatgttttttttagttggccttctaatcggcttgcctgcaaaaacaatgcaaatatgcagagagttaaaagtaagaagtgtatccataagtgcctatttgtatagtctatgttgtgaaggacgctcaagacacttagaagctccccctggaaatgggaacagggacaggaagggacaagaaggatggcataaacaagaccagactgcaaaaactgcaataaatgcctaattcttcaatgcccagacaccaatgaacacctaaaaacactgagaccatccaggaaaacatgagctcaccaaatgaactgaaggcaccagggaccaatactgaagaaacagagatatttgatctttcttttttttttttttttttttgagacggagtctcgctctgtcgcccaggccggactgcggactgcagtggcgcaatctctgctcactgcaagctccgcttcccgggttcacgccattctcctgcctcagcctccccagtagctgggactacaggcgcccgccaccgcgcccggctaattttttttttgtatttttagtagagacggggtttcaccttgttagccaggatggtctcgatctcctgacctcatgatccacccgcctcggcctcccaaagtgctgggattacaggcgtgagccaccgcgcccggccgatatttgatctttcttacagataattcaaaatagctgtgttaaggaaatgagaagaaattcaagataacacagtgaagaaattcagaattctatcaggtaaatttcacaaagagattgaaattattaaaaagaatcaagcagaaattctagagttgaaatactacagggaaacattggagaaactctcaaggacattggtctgggcaacaatttcttgagtaatatcccacaagcagaggcaaccaaagcaaacatggacaaatgggatcacatcaagttaaaaagcttctgtgcaaaggaaataatcaacaaagtgaagagaaaacccacagaatgggaggaaatattcgcaaactactcatctgacaagggattaataatcagaatgtataaggagctcaaacaaccctacaggaaaaaatctaataatccaacttaaaaattggcaaaatatttgaatagacatttctcaaaagaagatatacaaatggcaaacagacatatgaaaaggtgctcaatatcattgattgtcagagaaatgcaaatcaaaactacaatgagataccatctcatcccagttaaaatggctcttatccaagagacaggcagtaacaaatgttggtgagcatgagaagaaaaggggaccctcatccactattgatgtgcatgtacattaatacaagcactatggagaacagtttggaggttcttcaaaaaaaaaaaaaaaccaactaaaattagagttaccataggatccagaaatcctgttgtgaggtatatactccaaagaaaggaaataagtatattgaagagatatctgtacgcccctgtttgttgcagcattgttcacaattgtcaagatttgaaaacaaccacagtgtccatcaacagatgattggataaagaaaatgtggtatatatacacaatggagaactatgcaaccataaaaaaagaatgaaatcctaaatgtggagaaataggaacgcttttacgctgctggtgggaatgtaaattagttcaaccattgtaggagacagtgtggcgattcctctaggatctagaaccagaaataccatttgacccagcaatcccactactgagtatatacccaaaggattataaatcattctactataaagacacatgcacatgtatgtttattgtggcagtattcacaatagcaaagacttggaaccaacccaaatgcctatcaatgacagactggataaagaaaatgtggcacatatacaccatggaatactatgcagccataaaaaaggatgagttcatatcctttgcagggacatggatgaagctggaaagcatcattctcagcaaactattgcaagaacagaaaaccaaacaccacatgttctcactcataagtgggagttgtacaatgagaacacatggacactgggaggggaacatcacacaccagggcctgccgcagggtggggtgggggactaggggagggacagcattaggagaaatacctaatgtagatgatgggttgatgggtgcagcaaaccaccatggcacgtgtatacctatgtaacaaacctgcacgttctgtacatgtatcccagaacttaaagtataataaaaataaaaataaaaaagaagaatcataattgaataaaagtaattctaccactaaaaaaagaatgagatttgaaacaacatggatggaactgcaggacattatgttaagtgaaataagtcaggcacagaaagacaaacttcatattttctcacttatttctgggagctaaaaataaaaacaaacccatggagatagaaagtagaaggatgattacccgagggtgggaaggggagtgggaggatgggggagaagcgggaatgattaatgtgtacaaaaaaatagaatgaatgatatctaatatttgatagctcaaccgggtgactatagtccataataatttaattgtacatttaaaaataactaaaagagtataattggattgtttgtaacacgaagtataaatgcttgaggggatgaatacctcgttttccatgatgcggttattccacattgcatgcttgtatcaggttatcttgtgtgcctcattaatatatacacctattatatacccacaaaaattaaaaataaacaagtaaaaaataaaaataatgagcattatgaaccactatatgcctaatatatataactgacaatttcctggaaaaacataacatgccaaaattggcccaagaaatagagaattgaacagatgctaaatattgaagaaagtaaaatggtagttattggcttcctaacgtcccttcaaaaaaacctccaggaggcccagcgcggtggcttacgcctgtagtcccagcactttgggaggccaaggcgggcagatcaagaggtcaggagatctagaccatcctggctaatgtggtgaaaccctgtctctactaaaaaatacaaaaaattagccgggcgtggtggcggacgcctgtagtcccagctactcgggaggctgaggcaggagaatggtgtgaacctgggaggtggagcttgcagtgagccaagatcgcgccactgcactccagcctgggcgacagagtgagaatctgtctaaaaaaaaaaaaaaaaaaaagttggaaaagaattcaaagaaatgaagacctcttctttagacctcccctttccctctcctgttctgtagatgatctcatctgactcgacggctcaagataattttgtatgtctccaaattcgtatccccatacaaaacctctcacgtatctcagtacccgcctgccatctccctgctcgcctctcaggagcttaaaccctttctcgtgttaattcgttaagtacctccccaaattccttaagaagaaaatggaggccatccttgaccttcccttttgttttatgtccaagacccagtccaccactgaatcttcatgatttcacctccagatgtaggtagctaatgtatgttcctattttccctggtcctatcctagttcaagcagccctcccctcctgcctgagccactggtcttccaaacttgcttctgtctgtctccaagccttgtctgcatgtagcaacccaaatgaccgtctttcaacctatttgaatcaatccactcccctgctcaaaatacttcaataacctttcattgtaactaggataaaaaacagaaagactcaccagctccatctgcccctccttccctcctgacgttaatttgtgtcatcatcttgctcacaaaacactagcactgactttctctcagtcctggaacacaaaaaactaattccccactttcatgtccttgcaggtgctgtttcctctctctggaaaggtcttttctcagtcctttgagtaggtgacaccctctcagttttctggtcttagcttaaatgtctctttctcagatatcttttcttttgttttttttctatgtttagatgtttatttttttatttttccgtaagttattggggtacaggtggtgtttggttacatgagtaagttctttagtggtatttgtgagattctggtgtacccatcacccgagcagtatacactgcaccttatttgtagtcttttatccctcaccccctactcttccccccgagtccccaaagtccacagtatcattcttatgcctttgcatcctcatagcttagctcctacatatcagtgagaacatacgatgtttggtttttcattcctgagttacttcacttagaataacagtctacaatctcatccaggtcactgcaaatgctgttaattcattcctttttatggctgcatagcattccatcatatatataccacagtttctttatccactcgttgattgatggttattagggttggttccacgattttgcaattgtgaattgtgctgctataaacatgtgtgtgcaagtatctttttcgaataatgacttcttttcctctgggtagatgcccagtagtgggattgctggatcaaacggtagttctacttttaattctttaaggaatctctccacactgttttccatagtgactgtgctagtttacattcccaccagcagtgtacaagtgttccctgttcaccgcatccacgccaacatcagataccttttctgaccaagtgatctaagaagtcgatcacttctcttcccctattatctgtagctcagattcccgtttcctgggggcattcatcagtttgtgatgattttatttcccagtctgtttactttagaagacttctcccatactggtctgcagactccaggaggggaggcagttacgttcatcttgttcctggtggtatctgcagcactgagcccaatgcctgccgtcaacaacacatgaacagcgcaagaaaaagatgaacggcaagataaactctgggtatgagtagaactgaggttggttttgatgagaggtgtcgggagtctgggctgctcccagaagggggatgcaggggtgaagactgaatgcagggacttcagtagcaggtgagagggtacgttctccaaatgactctgtgggatggctgggtggtggcactgaggcagccctgcccacctcagaatctcaccatggagggcttgttattgttagatttgaaaagtaggggaaactgctgggcacggtggctcacgcctgtaatcccagcactttgagaggctgagacaggcagatcacgaggtcaggaaattgagaccatcctggctaacatggtgaaactcctactaaactctatgaaaaatacaaaaaagtagctgggcgtggtggcgggcgcctgcagtcccagctacttgggaggctgaggcaggagaatcacttgaactcgggaggcggaggttgcagtgaaccgagatcgtgccactgcactccagcctgggtgatagagcgagactcggtctagaaaaaaaaaaaaagaaacaaagaaaagtaggggaaactaggcctagaacgataatcatggcccattagtagtagaactaggaacagtgctgaaatcattcacattctcctccagcacagtgcctatggtgtcactctggcctgaaggaggactccaaactgacatgttttacacctgccaagtatgaggaccagaggcatgttgcttgaaacctgttggaaggcagtaaacttcccatagaagaggaaatacagggctaggttcagtcctataatcccagcactttgggaggccaaggtggaaaaattgcttgagcccaggagtttgagaccagcttgggcaacatggtgagacctcgtctctacaaagaaataaaaaaaattagccaggtgtggtgacacacacctgtggtcccagctactcgggaggctgaagtgtcaggatcgcttaagcctgggaggttgaggctgtagtgagcagtgatgatggtgccactgcaccccagcctgagcaacagagcaagaccctgtctcaaaaaataaaataaaaataaagaggagatacaaagacaagatgagttgttagccagatgaggtgttgtttggccagggtgctaaaaatccaattactttatgtggaggatataaggctgcgtagcctggtttgaatctgaagtcctttcagctctgagacagcggagctaggagtttggtcagagagagggcgggctgaggcagagagagggcgggctgaggcagacagagggtgggctgaggcagagagagggaggactgagggagccatggtttggtcagagagagggagggctttgggagccatggtttgggagagccaagagcatcctatccaccagaaagaggaaagggagatggagcaggaaggtgtccatgtgcgggaggagggagactctggcctactccttgtaaacaagactcatttcccaaggcctttgcacatagatattgagattgagggaattacccaggtttatctgaagacaccatcttgggattgcctccctgaggcctcccccaaactgataaataatcctgacacagttctgacatggcctcttccttcccgacctgaggctcagtcatcagctttcgggtcccgcagcctggctggggcaccctgtcttacattgtgtctcctctcttctggggaccaaaggtccaggcgccagttctcctgcttttcacctgtaccctgctccagccttgagtcccacaaccagacttacggccctgtatgtcctgactctgaacgttcactggatggaggagaaaagtggaggcagcagaacctgtgaattctgagagcagaacggacactgggtaaggtctggatggctcagcctcaggcttgatttcttttcttttcttttttcttcctttccttttccttccttccttcctttcttccttcctccctccctccttctctttcttttctttttctcttttctttctctttccttccttcattccttccttccctctctcttcctgcctccctccctccttcctttcttccttctctcttcctcctccttcctctttctctctttccttccttctttcttctttcctttttctctttcccttccttccttcctctcattcctctctcttcctttctttctttcctttctctttttctttttctttcttccttccttcctttttctctcttcttcatttccctctcacaaacatccttgcatactttaaaaactcttcatataatctcgcgtattagtgttgaaagggaatcgaagaatccctgcaattattttactgctcttttgcaaagtgctgtcacacgccctgctgcatgtgattctcacaacctgcaagaaagtctttgtgggtgcgaggaggcggctcagggatgttgcatgccctgctcgaggtcacgcagccaggaaatgacaggggaggtaccaagcacagtgtcctgacaccaagcgtggagcccttttccatatggcccccgcgttctctcccctcttcccccagccacgctgcaagagggtttgtctctctaaggccatctgaccacacaactgttcagaaccactgactcttacggactcagagcagtgtttcccaaagcacaggatccaaatcactgggtccttcctaaaaagacttggttctcagagcagaattcaaaacagggggccagaaaactgactttctgtgttgaggcatcacaggtgattctgatgcacagggtccggagacctttgccgtgagggctagaaagcagtggtactgattcctctgggggtctctggctttccctgtcacctgtcaggaaagagtcccagagggcgctgaactccaggcaccaggcttgctagggagtggacttgagcgacagaataggggaatcaaatctggtcttcgtcacttactagtcaagcaatttcaggaaacttactttccaagcctcagttcctcatctataaaatgggacaataggaccaagtagggttgttgtgtgaactaaagatcttgatataaagtatttcacacattgtctgaccaaatgctgagtaaaaggtggtggtttgctcaaaacacagttgttatgtgttaaacttggattcaaacccaagcttctgactcgaaattttctgacataccagtggcactgaatatctgagaactggatttggggaattggagtaatgaatccactcatttcctaaatgcagggcctgcctcatcctctgcccttcacctggagctccttctgggttactcacagttcccacatctgcatttatttattcttcattacttcaaattaataatgtttccgattgaatttgcagaacaggctctacactttgctggcacactggctggattttcgcacaactgcatttttctctgtactgtctcttactttcttaggctcttgggctcatcacgattccttacttattgttctcaattgcacggagtgtcgaatattctatgcagttcagttcagcccttgtgtatggatgcctacactatgactggtactggctgaggtcctgaggatgcagtaacgacaatgatgttttccctgctgtggaggtgctcacagtgtcgtgggaaaacagacatttaggaaaaacatgagatggaccatcctaaaagaatgtgaagaccaagatataacgcagaacctgtcattgtgacctctggggtgggaggaggtgcttgactgggagcaataatgggtccttccaggctgacagtggaagatcagagtggagaaagcgcatttggtgaaaaggaagagtgaggctaaggatggaaggaaaagtgtttcttgcattctagaagtgcaaggccagggagtaggagaagccactggggataaagcagcctggagcactgacgaaccggccacaaagttggcctgctctggaggacgtgggaaagctcagctactacagggacgctacgtgatctgctttgtaatttcgaaagcacacccaatgcagcatgggtgctgagccctttatattcttgccttcaccctcacagtgacactgaagactcagtagcactagcatccagtgtgggtgaactgcatgttttttatattattatagaagaataataaactggattcttaatttaacaattactataaccatctttccatatataaattaaaaaaaattagcatcattgtttatgatcattccagagtgttccattaattcgatggattatgtaattttaaaacagacttactgagatgtaagtaatgccataaaattcagccgtttaaagtgtacaacggaattatttttgtttgttttttgttgttgttgtttgagacaaagtttcactcttgttgcccaggctggaatgcagtggcgcgatcttggctcactgcaacctccgcctcctgggttcaagcgattctcctgcctcagcctcccgagtagctgagactacaggcgccaccaccacgccaggctaatgttttgtatttttagtagagacgtggtttcaccatgttggtcaggctggtctcgaactcctgacctcaggtgatccatctgccttggcttcccaaagtgctgggattacgggcatgagccactgcacccggccggaatggttttaatatactcatgtgcttttgcaactatcaccacatctaattctgcagcattttcatcactctcgaaagaatcctgtaccctttcacagtcgctcctcgtgtctccctctccccagctcctgggagccaccagtctaccttctgtctctatggatttgcttattctgtaatctttcaaagaaaatctcgaatgttgaatgtttatgttatttctacacttttttcgattattaacaggttctgagaaacatctcagaaaatacctacatttttacattgtctgattatattaaatttctagaattagaatatgctgaaacaaaagcatgtccttttttgttagtttcccaagtcacaaaatgacattgttgagtgtacgtttttctccttttttgtggaaaaatacttagtaattgatgccgaaaagatagttttcaaggataatagtgtgtgtgtgtgtgaaaatgagtttttgaacatattgttatgatcttcaagaaatataaaattaaatttatgaaagacttgaaggccagatacaaggagtctgctatttgctacagtgtccagcactgtgataatgattcccggcataaaagcaaaaagtgtacgatctcaagtctctttaataactgtcagtataacttataacagtgtgacttagctccaaaaagtctatttccttgcagtattttttgccatagttattgcattttcttttgcaaaataaatgcaggtgtgataatgcaaagtgagtaagattggccccccacaccacacaaacaggctgtggaccaatcctgtttataaatataactacaaaagccacataaaacattagggagtcaattttaatagtttataccaagaacacaagtatggctccatattgggaacgctgttaactgtgataaaaacttaaaaagcatctgcttaaagatgcagcagccctacttgattattaaaatactcctggtaaaatgcaagcagaaggagagttgctaaataaacatatcctcttcggcttaaagtcctttaaggctctttattgcatttgaaataaaattttaggctgggcgcagtggctcacgcctgtaatcccagcactttgggaggccgaggcaggcagatcacgaggtcaggagtttgagaccagcctgaacaacatggtgaaaccctgtttctactaaaaatacaaaaattagccggccgtggtggcgagcacctttaatcccagctacttgggaggctgaggcaggagaattgcttgaatccgggaggtggaggttgcagtgagctgagattgtgcgccactgcactccaacctcatgacaagagtgaaacttggtcttaaaaaataaaataaaataaaataaaataaaataaaataaaataaaataaaataaaataaaataaaataaaataaaataaaataaaagtactaccataacaatccactaaatccacgtgtactggctgtttctgaagttccatccagttctactcacctgctcactctagcatcagtaccaggcttcagagtctggatatttggcagagcgggtttccttcgttactctgtttcagtcttttcctagcttattttcatgcttacttttaggtaaaatttaggttagcttttgtttcccccaaatcccatgatcttgactttgagaggttaagcttcaggttaatgcaagtgactatgcgttacttttggtaattttatctatttattaaatgtatatcttatgtctcttgggagaatctgcaggtcctgagcaattcttgttaacatcgtaatacttagataatggaaatgggattgctttgtattgtattttaacctaattcatagatataatatatggaataatgggcaatatttgaatactttattacttaattttatccttgccacccccatgttgcacatgaaggatcccagttctggaagagctcaagtaacctgcctgggatgtcacagctagtcggtggtagtactcggatttgcattctgagggcacaggctgtatggctacactatatggcttactgggagcaccattagtttggggtctattcattttgtgtttggtaactttactgacatccctttttatttctagtgacatttcatcaattgagggttcccaaatagactatcatataagcaaataataatttttccctctcctttccaatatgttcccctttgtctagttgtacaatatctatttcttataatgtatacatctgttttaaaaatctataaaatgtcataacataacatactcatctttaaacatttcaagagtacagtaagatgataggatttaaaataagtcatagatattattcctataatattgagtatgccagattagaagttgctggaataattaagttgcacagagattttccacgttctgtttttgtgccttatgactttgttgcctatctaaacagattataaaatttagtctaaaatatttttaatgctaagaaaatagctgattttgcttatcttcttgtcatcttacaaattgaggacaccttgtaaacatttgttggtgttaatgttgcagagagttggggaaatggatggaggcaaccagagtgaaggttcagagttccttctcctggggatctcagagagtcctgagcagcagcagatgctgttttggatgttcctggtcaggtacctggtcacggtgctgggaaatgtgctcatcatcctggccatcagctctgattcccgcctgcacacccccatgtacttcttcctggccaacctctccttcactgacctcttctttgtcaccaacacaatccccaagatgctggtgaacctccagtcccagaacaaagccatctcctacacagggtgtctgacacagctctacttcctggtctccttggtggccctggacaacctcaacctggccgtgatggcgtatgatcgctatgtggccatctgccgtcccctccactatgtcacagccatgatccctgggctctgtatcttgctcctctccttgtgttgggtgttctctgccctctatggcctcatccatatcctcctcatgaccaggtgaccttctgtgggtctcaaaagatccactacctcttctgtgagatgtacttcctgctaaggctggcatgttccaacatccacgtcaaccacacagtactggttgccacgggctgcttcatcttcctcatccccttaggtttcatgatcacatcctacgcccgcattgtcagagccatcctccaaataccctcagccactgggaagtacaaagccttctccacctgtgcttcccatttggctgtggtctccctcttctatgggactctgggtatggtgtacctgcagcccctccaaacctactccatgaaggactcagtagccacagtgatgtatgcggtggtgacgccatgattaaccctttcatctacagcctgaggaacaaggacatgcatggggctctgggaagacttcgccaaggaaaagccttccagaagttgacatgaggggtaattttgggcattgaagtggagacagaaaatttcctccaccgtgagcaaggcctgtgggggatatcggagtgattagaacacaggtccagctcagaatgagtttatggatttgtggtgaagcaaagacgcctccgtctaacccaactgcagctgcaccagacccatctgcttcaactttaatgtaacaaggttgtaagttgtttttcagtggccatggctccttaggtcatgtgacctgagtatgctcggatgaaccaagcatgaaaccacaggagaaactaagtgctggggctgaagctttttctttttttttttttttgagacagagtctggctctgtcacccaggctggagtgcagtggcacgatctcagctcactgcaacctccacctcccgggttcaagcaattctcctgcctcagcctcccaagtagctgggactacaggcgcccaccacaacgcctggctaatttttttgtattttagtggagacggggtttctccatgttggccaggacagtctagatctcctgacctcatgatctgcccgccttggcctcccaaagtgctatgattacaggagtgagccactgggcccggccataatttttgtacttttagtagagacagggtttcaccatgttgactaggctggtctcgaactcctgacctcaggtgatccacctgcctcggcctcccaaagtgtggtgagagatgaagtccctggacttcctgggtagagtgggacttggagaacttttctttctagcaagaggattgtaaaatgcaccaatcagcactctgtagctaggattgtaatatgtaccaatcagtgctctgtagctagcaaggggatggtaaaatgcaccaatcagcactctgtaaaatgcaccaatcagcaggatcctaaaagtagccaataacagggaggattgaaaaaaaagggcattctgataggacagaaacggaacatgggcggggacaaataacagaataaaagctggccacccctcagccagcagcggcaacccactctggtctccttgcatgctatggaagctttgttcttttgctcttcacaacatttcttgctgctactcactctttgggtccatgccatctttaagagctgtaacacaccgtgaaggtccacagctccattctcgaagttagcaagaccatgaacccactggaaggaaccaactccggatacaccgggattatagatgtgagcatttaataatttaatacctgcctctggttttgcttcccagattccagattctcagcttcaggagaagcacctccactcttactgctttcgctaacttcatttccctaacactatattgccattgttttaatacattcttctttatcctatgggaatagttgtctctcattattattttcatttgaatagctctgacgtaataaggtttatctttttcctggtatttgttaacaatttgcattttttgttaatcactcttgtgcattttatttttggttgtgtattgttcaatttccagtactatggaatctctatgtatgtctttccttcagaagtaaccatgaccctgaattttgtgtttgtcattttcttccttcactccaacccgtggggagtacaattcagcatgatatttgggtagggacacagagccaaaacttatcagtgtccattcacctacagatggacatttgggttgtggggcaggcagcctctaaaatgtctcccagtgattgctgcctcatggtattcatagctgtatatagtcccctctcttgggtgtgggtgaaatctagggacttgcttctaacaaagagaatacagtaaaactaatgacttctgagattaagttataaaagactatgatttccatctcctctctttctggctctcttctcgattgctctgtggaaggaagcagacgtgttttgagaggccttagtagcaaggaactgaaggcggcctccagccaacagacagtgaggcactgaggcctccagtccaacaaccagcaaaatgtggaaacttaccagggatcacgtgaatgagcatggaagcttatccctccctggtcaagccttgagacagctgcaccactggctgataccgctaaggcagcctcatgagagaacccggacccagtatttctgatgcaaatttggcatcctaattgagatgtgctataagtttaaaaaacacgtaccaggccaggcacggtggctcactcctgtaatcccagcattttgggagggtgaggcgggtggatcatgaggtaaagagatcgagatcatcctggccaacatagtgaaaccctgtacctactaaaaatacaaaaattagccgggcatgctggcatgcacctgtagtcccagctacttgggaggctgaggcaggagaattgcttgaacctgggaggcggaggttgtggtgaaccgagatcacgccactgcactccagcctggcaacagagcaagactctgtctaaaaaaacaaaacaaaacaaacaaacaaacaaaaaaaacacataccagatttcaaagactatgaaatataaaaatgtaaaatctgtcacttataattttttatttttaaaatatttttcttttttcactacaaccatgacagatgaaaaattttaaatattaacatgttgaagtggtaatattttagattattgaattaaataaaatacatcattaatttcacctgtttctttttacttttattaaagtggctcttgaaaaatttaaattatgtatgtggttcatatgaaatttctattggatagcactgctctggatgatagcttcttcttccagaaatgacttatttttgagtctggcaggcagaaaggataggagtagatcccttttatccaacccatgatcgagttagttgcttaaagctgagtttcattctttgcgaggcttggcctatttccgattatgccttactcctagaatgtatagcacgctaaaactcccatttcaaagctgagagtgtttattgtacttttccctttggcagcaccttacctgcaagttttatctctccagccccataagccgctaaaactctgctcacttcttagcctctcagctacactctctgctatctcagtccctgtgttggagtcagcaaatgcgttttgaggggaagcagttcaatcattagcagtctgtttttgggattcctttctcttctgggttttggcccaagtcagacttggtagctcttttttgtctctcagacttctggtggcaaggtcatttctttgcttgatgaggagcaagagtctagagttgtcctcttctaccagagttccctgagggaattaactgaacgtcccaaaacatacactctgtcatgtactaacttccatcctatgcgtctagaatgttgccagctatgtatctttggggaaatttagaaaatagccgagtcattttgtgtagggcttaattctctcatggaaactgagttgagcaatgctagtgtaaagaatcttgttaaggtaacttaggtcacacacccatatagaaccatcacaccatcgccaggccattagatattctgataccccctctctggagcctgggctggaaccacactccctggagccacctggatgccaaacagaaattggcagctgtcagaaagggagaaacagaagtcggaaagaccataaatgttcaccaccagcagttatcaataaaataaaatgtagagtcctggtttacactccaacatgtaaagagattagaagtcatcagtcctattcccacaataaaaagtgcaacaaattcaaaagcaacaactcttcttagattcctcaaagaactcaagtcacagggcaagctgctgctctgaaaatgggagagaggtgaatacgaagaatcatggcttaactggaatagaagcccaggagcagaagcccactgctggggccagcacaggtacacacaccgagaccacaattgacaagtgggagaatcgttgtgaactagcttgggaattagaaactctgggctggggtgtggggagtcttaagaggaccgtcacagtttcctgagttttacctccaggaacaccaccagattcttactgtgaagattttagaaggatccttttatgcttctgacggggaggagaaaagcaacccctgtcagacccccaaaaacagcaattttgaaatatgctcagagtatatttccttaataatggctggctctcaagggaaatgattttaccagagcctaacccattgtaggtttttgtttttggagatagagttttgctcttgtcacccaggatggagtgcaatggggcaatctcggctcactgcaacctccgccacctaggttcaaatgattctcctgcctcagcctctggagtagctgggattacaggcatgtgccaccatgcctggctaactttttgtattattaatagagatggggtttcaccatgttggccaggctggtcttgaactcctaaccccaggtgatccacctgccttggcctcccaaagtgctgggattacaggtgtaagccaccatgcctgccccaactataggttttaccagagcctaattgacaatgtgggggaagaaaaatacccagctccctctaaccttcaacatggaggaagggaaatacccaactctaaacttcctgtctcacttaagggagaggaggaagttgagtagcacttgtgaaataacagtgcaggggcacaaactcatcatgagacctgagtgagaccgagacctaatcacaggattatagaatgctttccttgcccccacatctcaccatcacaccagtagggctcctatatgctaacgggattacaatggaaagaactgcaaggttccaaccctatttaagaaggaatatctacagaaacccaaagacaatggggagataaacacaaggacaccagagaaaattttacccactgatatctatggctacagcaaatagtaaacacagcctaacttctggccatataaacacaacacttcccactaaaggcctatttgccatagttccctttacccatacgtgatgtccagcattcaacaaaaattacaagacatggtaaaaggcaaaacacacagtctgaagagacaaagcaagtatgaaaaccagaatcagatatgacagagattttggaattatcagattgggaatttaaaataaccgtgattaacatgcaaagggatctaacggaagaaaagtgtacaatatgtaagatggttagtgtaagcagagagatggaaactttaagaatcaaaaggaaatgctagaaatccaaaacaccataacaaaaatgaagaatgcctttgacgggtgcatagagtgaaatgtttgtcaaaattcatgtgttgaaatctaatctctaatgtgatggtatttggggatggggctttggggaaacgattaggtcatgagagcagagccctcatggaagggatcagtgctttacaaaatgagccccagagagctcctttgtcctttgcactatgtacagatgcaatgagaaaacagccacctatgacttaggaagtgggctctcattagataccaggtctattggcagcaccttgatattggacttcccagcctccagaactgtgagaaataaatttctcttgtttataagccactcactctatgtattccgttatagcagcccagatggactaagacaatggcctcatcaatagactagagatgcctgagggaaaaaaaaaaatctgtgaacttgaagttatgtcaatagagcttgaagatatgtcaatagcaacttctcaaactaaaaagcaaatagaaaaaaatgataaaactaaaagagaatgtccaaaaactgtgggataataaagaaagatgtaacttatacataatggtaagaccagaaggagaagagagagaaacagggacagaataaatatttgaagtaatggtgtctgagaattttccaacattaataacagacaccaaatcgtagatctaggaaactcagcgaacaacaaaataggataaataccaaataatctacatgtagaaataccatatttaaactttagaaaatgaaagaaaagataaaaacttaaaagaaggcaaaggatgaaaaaccaactttacctatagaggaaaacaaataaggataatcttggatgctggtcaaagggcacaaagtttcaattaggtggaaggagtaagttctggagttctattgtacagcatgacaactatagttaataataatgtattatgtctttgaaatctgctagcaatagattttacatgttctcatcacacacacaaaaccataactatatgaggtgatgaacatgtaaattagctcgattgtggtaatcatttcacaatatatacatttatcaaaccatgctttatagcataggtacaattttttatttcttaatcatactccaataaacctagaaaaaattcaattaaaatactataatttttcaactttcagattgtaaaaattaaagacactatttataatagcccttgatagtagggatgtgagtaaacagacactatcataattcagtgaatttataagctggtgcaaaagtttcaaaaattaagaaaggtgtgtatgcatatctcaaaatgtgtatttgcacatcctttaatctgataaagttattcataagaattaatcgcagcgaactaattctagagatttggaaagacagcactgtaagaatattcatcactgtttgtctgttgttggtgtataagaatgcttgtgatttttgtacattgattttgtatcctgagactttgctgaagttgcttatcagcttaaggagattttgggctgagacaatggggttttctagatatacaatcatgtcgtctgcaaacagggacaatttgacttcctcttttcctaattgaataccctttatttccttctcctgcctaattgccctggccagaacttccaacactatgttgaataggagtggtgagagagggcatccctgtcttgtgccagttttcaaagggaatgcttccagtttttgcccattcagtatgatattggctgtcggtctgtcatagatagctcttattattttgaaatacgtcccatcaacacctaatttattgagagtttttagcatgaagggttgttgaattttgtcaaaggctttttctgcatctattgagataatcatgtggtttttgtctttggctctgtttatatgctggattacgtttattgatttgcgtatattgaaccagccttgcatcccagggatgaagcccacttgatcatggtggataagctttttgatgtgctgctggattcggtttgccagtattttattgaggatttttgcatcaatgttcatcaaggatattggtctaaaattctcttttttggttgtgtctctgcctggctttggtatcagaatgatgctggcctcataaaatgagttggggaggattccctctttttctattgattggaatagtttcagaaggaatggtaccagttcctccttgtacctctggtagaattcagctgtgaatccatctggtcctggactctttttggttggtaaactgtcgattattgcctcaatttcagctcctgttattggtctattcagagattcaacttcttcctggtttagtcttgggagagtgtatgtgttgaggaatttatccatttcttctacagacaaacagagagccaaattgtgagtgaactcccattcacaattgcttcaaagagaataaaatacctaggaatccaacttacaagggatgtgaaggacctcttcaaggagaactacaaaccactgctcaaggaaataaaagaggatacaaacacatggaagaacattccatgctcatgggtaggaagaatcaatatcgtgaaaatggccatactgcccaaggtaatttacagattcaatgccatccccatcaagctaccaatgcctttcttcacagaattggaaaaaactactttaaagttcatatggaaccaaaaaagagcccgcatcgccaagtcaatcctaagccaaaagaacaaagctggaggcatcacactacctgacttcaaactatactacaaggctacagtaaccaaaacagcatggtactggtaccaaaacagagatatagatcaatggaacagaacagagccctcaaaaataatgccgcatatctacaactatctgatctttgacaaacctgagaaaaacaagcaatggggaaaggattccctatttaataaatggtgctgggaaaactggctagccatatgtagaaagctgaaactggatcccttccttacaccttatacaaaaatcaattcaagatggattaaagatttaaacgttagacctaaaaccataaaaaccctagaagaaaacctaggcattaccattcaggacataggcatgggcaaggacttcatgtccaaaacaccaaaagcaatggcaacaaaagacaaaatcgacaaatgggatctaattaaactaaagagcttctgcacagcaaaagaaactaccatcagagtgaacaggcaacctacaaaatgggagaaaattttcgcaacctactcatctgacaaagggctaatatccagaatctacaatgaactcaaactaatttacaagaaaaaaacaaacaacaccatcaaaaagtgggcgaaggacatgaacagacacttctcaaaagaagacatttatgcagccaaaaaacacatgaaaaaatgctcatcatcactggccatcagagaaatgcaaatcaaaaccacaatgagatatcatctcacaccagttagaatggcaatcattaaaaagtcaggaaacaacaggtgctggagaggttgtggagaaataggaacacttttacactgttggtgggactgtaaactagttctaccattgtggaagtcagtgtggcgattcctcagggatctagaactagaaataccatttgacccagccatcccattactgggtatatacccaaatgactataaatcatgctgctataaagacacatgcacacgtatgtttattgcggcattattcacgatagcaaagacttggaaccaacccaaatgtccaacaatgatagactggattaagaaaatgtggtacatatacaccatggaatactatgcagccataaaaaatgatgagttcgtgtcctttgtagggacatggatgaaattggaaatcatcattctcagtaaactatcacaagaacaaaaaaccaaacaccgcatattcacactcataggtgggaattgaacaatgagatcacatggacacaggaaggggaatatcacactctggggactgtggtggggtgggggcaggggggagggatagcattgggagatatacctaatactagatgacgagttagtgggtgcagcgcaccagcatggcacatgtatacatatgtaactaacctgcacaatgtgcacatgtaccctaaaacttaaaatataatttaaaaaaaaaaagaaaaaaaaagaaaaaaaaaagaatattcatcacaacattgttgttgcaaaacaattgaaaataacccaaattatagaaatagaggtttaatgaaagaaattgtgacttacatgtttaatgatatactgtgccaccattaaaacagataaagcaggatgttagtcttcattatgtaaaagattgtatggcacaatatgcaggaaaaacaggaagcagatcacagaacagtatggttctactgatgtgaaacgggcatatcatatatacaggaaatcgctagaggaaaaaacacaacaattgtcagaggcgtaaactctgaacagtgtgatttttggtgcagtgaaggaacatttggatttttatttcctacttgacaaaataatatcgtctgaatgtttccactattaggtataacattctgaataatttttaaaataaatatatttacactgggaaggaaggaagacaggcatgcatgcatccctcctttccaggaactacatttatgggtatgtattttctaagcaaggagctttgagagagctaagtaagactttggaggagaaggttatattggatattctacattgaaaattctaaggacctgattgtaatacaaacatttactctttcaaaaactttatcatatgtgtgaggaaggtaacattaaatgagagaaaaaggcatggcagggaatggagatgaaaccttccttttatgaccttaagatatatcatatatgtatgaacgtagttttaatttagtgggctcttttcctctctagacctttcctgttccctaaacatccagcaggattctttttttttttttttttgagacggagtcttgctctgtcgcccaggctggagtgcagtggcgctatctcggctcactgcaagctccgccccccaggttcacgccattctcctgcctcagcctcccgagtagctgggactacaggcgcccaccactacaccggctaattttgtttttgtatttatagtagagaaggggtttcactatgttagtcaggatggtctcgatctcctgacctcgtgatccatccgcctcggcctcccaaagtgctgggattacaggcgtcagccaccctgcgcccagtcaacatccagcaggattcttttgtggtagcggagagaagaaaatgaaggtgaaaggcaaacaaatgaatgaaataatccattgcactaggcctatggttttggtttttttaaaaaactttttaacaagtttttaacaaaacaacaacaaaacaaaacaaagaaacaaacaaaaaattttcccctattctgatctgcagggaatctcatgtcctcaccagaaatattgcagaaatacttttggtcacttaggctgtgattgaccgactggacattctttgtagaatgctgcttgccaggcacacagaactacaaggctttaactctatccagaaagtaggcacagccaaaaacagggtaaaacttgcacagggcttgcttggcagaacctgacttcatattaacatctttgttcatctctatagaaactatcatcatgtggtatatatgatgcttatttactttgtctacttttatagcatgtgagttgcatgagtgcagagacttttgtccattttgtccaccaatgccttggaagactgtccagatcatagaggtactctaataagtatttgttgaatgaataaattatgtagggtttcctagtaggacaaatatgtaacaccgatcttcaagcatcaggagataggaaaaatagttgtggctgaatttttcctggttactgtcttcatgggaaattttcctcagtccagaaaaggcaggaaaggagggaccccattacctctcaggtcagtgatctcctccccaaaaatatttgccacagagcaccctgaacatcagggtttctgaggctgtagataagagggttcagcatagggttgataacagtgttgaaaactccaacccctttatccttgtctgaagcctcctctgaacccagtctcatgtagttgaagatacctcttccaaagaaaagacaaaccacggtgaggtgggagccacacgtggagaaggccttctttcggccctccactgaacggattcgtagaactgcagctgccacgtggctgtaggcagtgatgatgagaaccaaaggtgtgcctgccatgatgaaacccacagcaaagagcagcagctcattgagttgggtgctggagcaggagagctggaagagctgtgggaggtcacagtagaagtgattgacctcattggggccacagaagttgagcgtggacatggccacagtgtgggtcagtgcgttggtgaaggcacaagccaaggacgcagccaccaacatcctctggactgtctgactcatgcgggtgctgtaggtgaggggctggcagatggccaggagtcggtcataggccatggcggtcagcaggaagcagtccatcccagccagaaggtggaagaagaagagctgggagaggcaggcgtcataggaaattgtggacttgtgggacaagagacgacccaacattgcaggaacagtgacagtgatacatccgacatccagcactgacaggttccccaggaagaagtacatgggggcgtggagtttgggctccaccaagacggctgccaggatgctgaggttgcccccagttgtgaccagataggcaaagaggaggagcacaaagacaactggctgcatctcttctgtttgcactaggcccagtagaatgaactcagcaacagcggtcctattggtcccagcttctggctccatgagtttctgtaaggacatgtcccagcaggggaggtatcagttcactcagttcacttattcaacattaatattttaaaccatttatgttcaaagccccgtggcgagtccccaggccatccctcactcgttgacctcctccatcacctcaatgcctttaccttgctcttggttgacatgcccaatgacaccaccaccttgtcctcctcatcctctgctagctgaaaaggtcagaatacctggaacaacatgagaactatagttaataaagtgtattgcattcaggatttttgctgagtagattacagctgtcctcgccacaggggggaaatgggtaactatgtgagatgatgaatatgttaatttgtttcactatagtaaccattttactaactacaagtatctcataacatcatgttctgtaccttaaatatagacaaaaactttgttttaaaaaacatacaaggcttcctctatgaatatagttagatttagatgaagttttcctattgctctctgagggatcatcccaaactaataagcaggtttcaaaatagaaatccagagaaagtagaatgcatttaaaaacataacccaggctgggcgtggtggctcacgcctgtaatcccagcagtttgggaggccaaggcgggtgcatcatctgagatcaggagtttgagaccagcctgtccaacatggtgaaaccacatctctactacaaaaattagcttcgtgtggtggggggcacttgtaatcctagctactcagtaggctgaggcaggagaatcgcttgaacccgagacgtggaggttgcagtgagccaagactgcaccattgtactccagcctgggtgacagagcgaggctccatctcaaacaaaacaaaacaaaacaaaacaaaaacacctaggtttaaaggcttctagacataataaaggtcaagcaaagctgtagcaagaatcagagagaaggtattcatgattgtggatatcagaaagaccagccaagtacatttcttcaaggtgagggaccacactctgaagtatcaactcaacatttcttgttcaataaattgttaatgttattgttacttaagcccctacaatggactttgactaatgacttactgtaaaatgatgtttttctgtgtgtattatctgctattcctctctaaaaccaaagttgtggtcatagcctgtgggttggttgccgccaggtgcagttacattctgcattgcacagtcactgtccttcccttgtccttgacttaggcacggtaggttgaccaatggctctaatgatacatcctgaaatgacgaaggcatgtacttggaaaaccacgctgaagtcatttttcagattttttttttttttttgagacagagtcttgctctgtcacccaggctggagtgcagtggcgcgatctcggctcactgcaagctccgcctcctgggttcacgccattctcctgcctcagcctcctgaatagctgggactacaggcgcccaccaccacgcccggctaatttttttgtatttttagtagagacggggtttcaccgtgttagccaggatggtctcgatctcctgacctggtgatccgcccgcctcggcctcccaaagtgctgggattacaggcgtgaggcactgcgcccagcccatctttcagattttatatcctactccagatcaaaaaacatcaatgtctctattgcccatggaataagccaggccagaggttctttaaaagcaatgttactcccttgcatagaatagactggaatcagaggatgggaagcagctggaggggaacagtgatgattgcctgagctggggcagtgaaatgcagaggcaggaatgattaaggaggttccagaaatcagaaatgctgtagcagcagtatgactgatatgactgcctaggggtgtggtcaccaaaatgatgtttaaatcctttgttcataaaagtgggaattgagtgcacgggttggtggcacggtcttaactggtctcactaagatctggaaagcagaagaggcaggagtgaatgagaagccatccgggcaggctgactgtgcagtgtttaggtgggactttaaaagcaagaagccggcattatcagcagttcctcagcctctggtgagcactgactagggaagtcaagggaaaatgtactcacaatcctggaacaagtgacttacagccagtatcaaccttggctgcacattagatttatgtgggagcccccaaaactcctgttgtccagaatttacccacaggccgattaaatcagaatctcccaagataatacccaggcatcaggatttttttttttttttttgagatggagtctccctctgtcaccaggctggagtgcagtggcacgatctcggctcactgcaacctccgcctcccaggttcaagagattctcctgcctcagcctcctcagtagctgggactacaggcatgcaccaccacgcccagctaatttttttgtatttttagtagagatggggtttcaccatgttggccaggatggtgtcgatctcttgaccttgtgatccacccgcctcagcctcccaaagtgctgggattacagacgtgaggcaccgcgcccggcagcatcagcatttttcaaagcacccacctgatcactgctgtcttagcatttaactgagcagatacttccaacgactagctctttcttgccaccccctcaaattaagagttttgtttgtttgttttgttttctcattttacttttactgataaccctgaagggagagcaggaaatactttataaaatgacacacagaaaagttacaaaaatttaagataccttgcaaaggtttggtggtatttccagcctcgatttccaactctgttaaattagattcttagtccccatgcttattggaatcacctgggatgctttaagaagaaaatactgatgctcaggcctttcaccaagaattttgatttaattggtttaattggtggtacctgggtatgggtgtttccttagcgcctcccaggtggttctaatgcccagccaggacagagaactctgccagatttgcagcctgggaggcatgatgatggcttgtttccctcttcattgtttttctccataccggacatgaaggtcaccagcccttttaggtgatccagccacttccacaaagactcctccacctacgcttagaatcaaggtaatctcagccaggtgcagtggctcacacctgtaatcccagcactttgggaggctgaggtgggtggatcacgaggtcaggagattgacaccatcctggctaacacggtgaaaccccattcaatacaaaaaattagccaggtgtggtggtgggcacctgtagttccagctactccggaggctgaggcaggagaatcacttgaacccgggaggcggaggttgcagtgagctgagatcgcgccactgcactccggcctgggcgactccgtctgagattctgtctcaaaaaaaagagtcaagatagtctctaaagactgacccgcagtttcatgtggataacgtgcatctcactggagtctctacagcaaggggatgtctccaatgtgaggctgtctcgatgaccagccttccaaatgaggtctccactgtgtgtgctcaggccacggggaagctgcagaggggatgccacatgggtgagaatgtggatgcggtgatctccaagaggtccttaaagttctaagatcacatgacttggaggagggcagaaatcatcctctggcctgattatcactgacagaggtggtaactgataatgctttgcaaatcaacaaatcaaagggtgatagctctttacatatgttatattaaaggatagttgactacttccctttttcctgtcaggtccattttaacagaagcattggacagcaaccctgtgatcttccagctccttgctcatgctgttttccccacctgcaatggtttccctccaacggcacatgcccagatatttcacaacttgactcaaatgctgactgatgaattaatccttccttgaaacttctccatctaaaaagaatctctctctccttcttcctctcttctgctctcctcttctgtctctttctctctctctctctctcctcaccccctaaactatcaatatacaccatttcttggaatttatgactgtttacattttgggtgagtcacttctttatagagtctgtctctgtaagtgacttgaggacagaatatgtttgattcattttcaatagcaataatcatcataacactttacacataggtacccaatatttcatatttttctctttttttgagacagagttttgctctttttgcccaggctggagtacaatggcatgacctcggctcactgcaacctctgcctcctgggttcaagcgattctcctgcctcagccttctgagtagctgggattacaggcatgcgccaccacgcccagctaactttgtatttttagtagagacagggtttctccatgttgatcaggctggtctcgaactcctgacctcaggtgatccgcccacctcagcctcccaaagtgctgggattacaggcgtaagtcactgcgcccggccggtatccaatatttcttaaataaatggatggttaaaatgtgtacgatatcatcagtatgagctagagttctcagggaagactttctggacacactggaatttgtcatggcttagtgtgctttaggggaggtccaggttaagtgcagggttcaaggctgtggcagggactcctctgtgttaacaggacaagcaggtcatggaccagtccacatcttctttttacttaaacctcccaaaacaatacggcccttaggaggggccacaccttacagacaagtaagtcatggtcaggggtagaagaaccactaaacagctgttgccaaccctcagacagctagagatacaattgcttaaaaccagggggattctgggatgacctcaggtcaccgagacatccagagggtctgacagggtccccacgaggcccactggggagccctcctgcacgaccactctcgaggctccccttacgagctgtgacagctccctgctctggaactccagcccatccctcacgcgcccaacatgacgaggctcaaggacttcgctggagcgagggttccccgctgcctgatgcagtgggtgcgggcagtgaactggtctgagcgagtctcctcacactcatgctaacaggcagcaggcttcatctgagagaggcgagcacggggaaaaccacaaaagaacccaggacctccgggctgtagtgccaggtcttcccctaaatggctttccctgtcaggggcatccatcgcaccaggcttactaagctgatggcaacagaagccccttctctatcttgcaggagcagaggaaggactcaggagaacactcaccctggcaagggcacggaagccactgaggtttcttcaggaaagaaggggaggagctgcgcacaccccgttatcctcccggagagcgagtgaggggctaatgactgagaaatgagaggaatcaagctgctgtcttctctgtacagggctgtgttcactacagcattctcctctggggcactcagaaactggctctcctaggagagagaaggatggggggagagacacggaaaaggagacacctcaggcccttcatactcatggcaacgatgcctcaccccttctggtatttagactttctcacaaggaaggctttgcctctagccctggctttgtgggcaggttgttacggcagatgatgtccgctctgcttaatgtgggtcactgaggcctacaggacttgcctatgtcctcaaagtcccccaggaagggagaggtgcagctggagactctatatgggctttctaaggggatattttctttcccagatatcaaccagggcatttgagcagaaacaagccaattcctgaacttgtcttggacctggggaggtaggaggaggccccagaagggagataagagggaaaagctttcttcaaagccggtttcctgttgagccctcagtagtgaggcgctttctctcctggggacttgttagtgggggacacttggactgtgtcttggggatcctataatgattctagaggtggtgggagatgagccctatgatgctagcaggactactgggaaggtgcctatcaacatgattttctaagtccggccctgaggaattgagaggcctggtgaaggtggcaggttaatgaacagaagctgtgggaagatgtaggcgtgtgttcctctgactcctcttcccactaacattccctcgcctaagagagagggctccttcttctcccaccagggagttgtggtgcagtagaaaaagcagaatagacaaacctgttcttctgattattagtggtttgactttgtacaagctgcaaagtcagttttggggcctcagtttcctcatctgtaaaatgagatatccttcctcacagagcactgctgtgaacattacattcattaagttgctaatagaggttcaacaatttatctacatatgaattgataacaattatgagtatctgtggctgtgtgtggtgactcaaacttgtaatcttagcactctgggaggctgaggcggggatcgcttgagcccagaagttcaaaaccagcctgggtaacatggtaaaaccccatctctacaaaaaataacaaaaatttgtcaggcacagtggtgcgggcctgtagtcccagctactctggaggctgaaatgaaaggatcgcttgagcccaggaggtggaggctgcagtgagccgtgatcgcaccactgcactgcagcctgggctatagagtgagaatccctcccaaacaacaacaacaacaaaacaaacacagacaaacaggaaccatttatgagtgtttgtcatgtacatggtaacatgctaagaacacaacaagcctggagtctcagtcttcacaattctatgaagtagattttctctttttaaatatactctaagttctggggtacatgtgcagaatgtgcaggttcgttacataggtatacgtgtgccatggtggtttgctgcacccatcaacctgtcttctacattaggtatttctcttaatgctatccctccccttgccccccaccccccaagaggccctggtgtgtggtcttcccgtccctgcgtccatgtgttctcattattcaactcccacttatgagtgagaacatgtggtgtttggttttctgttcttgtgttagtttgctgagaatgatggtttccagcttcatccatgtccctgcaaaggtcatgaactcatccttttttatggctgcatagtattccatggtatatatgtgccacattttctttatccagtctgtccctgatgggcatttggcttggttccaagtctttgatattgtgaacagtgctacaataaacatacatgtgcatgtgtctttatagtagaatgatttatattcctttgggtatatactcagtaaggggattggtgggtcaaatggtatttctagttctagatccttgaggaatcgccacactgtcttccacaatagttgaattagtttacactcccaccaacagtgtaaaagcattcctatttctccacatcctctccagcatctattgtttcctgttgtttcctgactttttaatgatagccattctaactggtgtgagatggtatctcattgtggttttgatttgcatttctctaatgaccagtgatgacgagatttttttcatgtttgttggctgcataaatgtcttcttttgagaagtgtctgttcatatccttcgctcactttttgatggggttgttttttcttgtaaatttgtttaagttctttgtagattctggatattagctctttgtcagatggatagattgcaaaaattttctcccattccgtaggttgcctgttcactctgatggtagtttcttttgctgtgcagaagctctttcattagatcccatttgtcagtttcggcttttgttgccattgcttttggtgttttagacatgaagtccatgcccatgcctatgtcctgaatggtattgcctagattttcttctagggtttttatggttttaggtcttacatttaagtctttaatccatcttgtggtaggtagaagaatgggccccagagatatccaacctaaaccctggaatctactttatatggtaaaggagactttaaagtttgagatcttgggatggggacatcactcaaataatgtacactgtactaattaagtaatttctcatcatccacccccctcctacccacccacatttctgatacatccacagagtgcagagtggtcaggtcagggtgtttagggttcccatcactcaaataatgcacattgtacccattaagtaatttattctcatcatccacccccctcccacccactcccatttctgattttccattgtctatccttccactctgcatccatgtgtacgcggtattgtgtctatatctctgctgagattttcattccttgaaaacatgtttaattttttacctaatttggggtaattataacagccatttaaaattttcgtctgttagtgtcaacatctagttcatttcagagttggacttgctggattttcttttctctggagaatgtgttgcattttcttgattcttcatatattaattctggactgtatcctggacattacgaatattcagttctgctggagattctcaattacattatttatcacgtgtcatttcccatgtttgataggtaattctcttggcgaggcttgaactgcaaacttgcttcgtgggtggcagcattggtctcagttaaaatatttttacttttgctgaatttatgtttttctattatatatatataatatcaatatactgtatatgtaatcgagcttatattaaattttataataaaattattgtgttgagacaattgttatctactaggaaaaaattagagcatacataacaataagctctaaatatattaaatatttgacttaaaaagaaatgtaaaaatactagaaaaacatcagacacatatttatacagcatttagatgaaaaagctctttttcctaagcatgacataaaacaaagaagataaaggtcataaaatataaaattaatttgggcagcagttactctaaacaaaattaaagacaaatgggaaattaggaaatatgttagcaacatatatggcaaagaattaccattttaaaacagaaaaggtttctaccaatcatttacaaaaagataaactatcaccaaaagggcaaaaaaaaaaaaaaaaaaagacaaaaaaagaaaaagaaatctgcaaagaagaaatacaaataacaaataaatacagttatgagctgtataatgatgttttggtcaacaaagcctgcatacatggcagtggtcacagcaataggctattaacaggctatttcatatagcctaggtgttcagtaggccataccacctaggtttgtgcaagtacattcttacacaggggtaagcgatgtttgcacaacacaatcacctaacaatgcatttctcagaatgtatccccgttgtagagtgacacatgactgtacataaaaatgtgttcaaccacacccataatcaaagaaattcaaattaaaaataatacagtatttcatctagttttcaaatataaaaagatatatatataacatccaatgaggtcaaagatgtgaagcaacaagcatttgcatacactgccaatctggatgtaaaatgctgtacattttttggcaaatacaaaggcagaatacttattaaactttaactttgcatttgtatttctgatagtgaacacgtacttatacacaaacacacaaactacgttcatgaacttagccactggaaataatttcagatactcagctatatatataaatactaatctcagtattattggcagtcgcaaaaataggaactaaattacatcaatggggtgtggttaaatagattataattttacataaatggaatattatgcagcctttaaaatgggtaagatagatttgtaggctcacatgtaagaattatactatgcaatatagacagagaaaagtcagattacaacacagtatggttttgaatgtgggtgtgtttgtgtgtgtgagtgtgtgtttgtgtgtgttcatttggaaagctaaacatgaaactattaacagtagttacttttaaagataagattactgtgcggatggtgcggaagggtggtgatgttctgtactgtttgtacatttacaacatgatgtattacatggataatagaatttttaagtagcaaggagatttccagtttgaaatataaaaggggagaaaaattccaaatgaaatggaatctcccaaattgataaagaaaccgtgtgatcctggagggtgaacagggacctgggaatcaggcctttggccattgtctatgatgctggacccagtggctccattccaccctagtggcaaggccaagaccgaaatctctccttgaggcttgaagtaaagagccagctgaagaaatgccagaggcaccagatctttggagataaacagcaggctcagttttgctgcaggggttaaatgtagccaaagaagtgatggtggaaggtgtggtagctccctcagggtaaacagatacagtctttctattcattcaaactaacagactcagagaaatctcgcagtggaagaaccttaatataacctagtgcttttggtcaagaacagacccagaggaactcatcaacttattcaaggtcaagcgtgtcgtgaatgagagaagggatgagatgagaaccacatcccaggtcttccccaacggtcttcttgaccctggaagaagactcactctttgtgtccctgaagtttgtctgatgatgcaataaatcagaaaaaggcatctttttcctgtgtctattgacgccgtcagccagcatgactcaaaaggtagggagtgttaagttgggcagttcgtcacaaattttgatgacattttagatacgtagctggagaaaatacccagcactcttttcttctgtgttttctcatctagtaaaccttcttcctgacatcctaggagcacctctgtttagagaaagagaaaacgagtccttggtgtactttttttgtacacttagcataacttaaaatatcaatcacttccttcttagtagagaagacggactacaatgatggcatcaggagtgctggaattggttattgctggaaaacatagaatgggaagcccacatctctcatgtgtgacccacttattttatgcccccgctttcttcctctgatctttcaatactctcaaggcatcttatccaattcctccattctttctcatttcccattctgtgtaccacgtttggtcctaaccccctccacttgcaattctctcccagttctccctattcctcatctttccacttcattttcctaccaactctcctcctccagtcttgttttgcttccctcttttgtgtcttttctctttatctctatcttactgcatctattcaatccctcacccccataaaatattatagagaagccaagtcacaggtgccagtcaaaggaaagttttaggaaaatgcatttggaaacagcagtggcacagcagagttgccaggaatgggcaatgagtcctaaatgggaagctgaaaagatacagcgaaatcatggctggtttaacttcaagcaagttgagctaatgctctgggtcagagccacactcccctactgagaagggacattcagggtgactcctcaccatatgacttgcatttatagttatggattatctcagcaaggaggtttggagactaagagtgagagttttggagaaattttcatattgagtagtcttggattttctgaaatatgtaaataatgcttagattataaattcttatcttttcaaaaaatttgaaacacatgggagaaaaagatgaggaaaattcatttttgtaacataagatatataatacatattaatggagttttagcatttggaaacaagtctgtgagctgcacacaggtatcaggtgctccagaattactagagaatacataatcatacagcttcccctctgtcccctgtctatgctatggggtccttgtttaatgggaatagaaagagctacttttttgtttttgtttctttttgttttatttttgcttttagagttctgatgggagaaataaaacaatcctaatctctagacctatgttttataaacagaccaagcacacctgaacttgagggaaaaatatgacttctggcggggagttttctggggtacttctggcaactaaggctgtaaccaaccaaagagtcattccttctggaacatgaacctgtcagcactcacagcttcctaggtttcacctctagccagaaaggagagaacacggtgcctgaagctgaatttgtctaaggggctggcttggcagatcctatacactcattgcttataattggacagggctgctttcagaaatgaaaactattattccctacaaaaagtccttcttatgcccatgaaacagaaacaggtgtgaaccatttttttcctagtttctggctctagaagacttttcctttagtacaagacacagggagaaagggtcaattgagacctcctcaagccagtgaccgcctccctgtgagcatcctccagatggcactctgcacatcagggtttctgaagctgtagatgattgggttcagcatgggattgatgacagtgttgaaaattccaacagctttatccttgtctgaaagcttggttgaacccagtcgcatatagttaaagatacctgaaccatagaatatggcaaccacagtgaggtgggagccacatgtggagaaggctttcttcctgccctctacagagcgaattcgcaggactgcagctgccacgtggatataggagatgacaatgagagccatgggggtacctgccattataaaacccacagcaaaaagcagcagctcattgagttgggtgctggagcaggagagctggaagagctgtgggaggtcacagtagaagtgattgatcacattggggccacagaagttgagcgtggacatggccacagtgtgggtcagtgcgttggtgaaagcacaagcccaggacgcagccaccaacatcctctggactgtctgactcatgcgggtgctgtaggtgaggggccggcagatggccaggaatcggtcataggccatggcggtcagcaggaagcagtccactccaacgaacagatggaagaagaagagctgggtaaggcaggccccacagggaactgcacgcttgcgggacaggagacgactcaacattgatggaacagtgacgctgatgcacccaacatccagcactgataggttccccaggaagaagtacatgggggtgtggagtttgggctccaccaagacagctgccaggatgctgaggttgcccctgaccgtgaccaggtaggcaaagaggaagagcacaaagacaactggctgcagccctggcgcctccagcaagcccagcaggatgaactcagcaatgactgttccattggccccagattctggctgcatgagttcctgcaaagaaacatccagggaggaaaagaatcactcctcccaataatttatttactcaagaaaaagaaacagacccccttctacttgcccggccctctgccacgttccctctgtacaagtaaggaattttgcgctccttaggccacactacacttgtttactctgtcgctacatttacctgaataactttatttgcaggcgtaagcacaggtaacattaccactctggacctccctcctccaacccgccccccagctgcaagaacctatttgtaaagattatgaaagacaaacccttgggaaaaataagcaaaaagtgtacttctggtttgaacatggccgagtaaatccaaaatgttctcttctcagaacttatctctttccaaaacaagcagaaaaataaacatacagattctatcttcaaagaaactagtaagtgtccacaaccccaatccataaactagattggatggattcaagaacagtaaagatcaaataggagagtgacaagaagcagagagaggaaatccatgactgtataagagttaaatgagtataattctcttaaaaaaaaaaaaagggtgggtagggggaggcaatcaacaaaaaacaaaaccaaagctcttgtttgcaataatgggtatatggtgtaaagtatggcaccataatcctctgtgaccctgaattggactcaagaagcagagaaaaggctaaatgaagacttaggtacacaggctatagataaagcataaaactggaggcaaaaggtagaaaaaaatacatcagttctaacagttctatttacctgtctgcattcattacacacaaataaaagctaaaataatttacctccaattctgaatcacaaggtaggttcctgctagtctgaaacatgtcttagacttgcaagatacaagcatcttgtgaatatctagtttggcaaaaactcatgtcatttaaggattaaaacaaacctgcacatcatataaacaaggattctacaagaaaaaagaggtaaataaacaagaaagacaaatggatgacaaaattcactccatcaaagaatgttgccaatgaacatatgaaaactgttacctggcaaagacatggaatcaacccaaatgcccatcaatgacagactggataaagaaaatgtggtacatatacaccacggaatactatgcagccatgaaaaagaatgagatcatgtcctttgcagggatgtggatgaagctggaagccattatcctcagcaaactaatgcaggaacaggaaaccaaacactgcatgccctcacttataagtgggagctgaacaatgagaatacatgtacacagacagggaaacaacacacactggggcctgtcatgggagggtggccagggcgagaacattagggaaaagagctaatgcatgctgggcttaatacctaggtgatggggtgataggtgcagcaaaccaccatggcacatgtttacctatgtgacaaacctgcatgtcctgcacatgtaccccagaacttaaaaaaataaaataataacaataaaaaagaaaattgttacccaacatttcggcctctctaaaaataaaataaaaaaaaaacttaaggaggcattttctggtataaaataagaaaacagagtaaaaatataagagctgagggaagggattgcaagaaagataagaaatatgagctggaagaagaaagaaaagatgttaaagaaatgtaaaattactataccaaaaaaaccaatattagaaacaatacatggaaaaaaattagacagatgcaggaacagtattttaaaagatgacaagatgcaatgagaaaagagagaaaatgacagatatgagaaaagacaaaggagatccaatctatgtacattcgagttaccaaaggaggaaatcaaaaaagtggaaaagaacaattatttaaaactcaattttaattaaaaaattacagaaacacttgactttacaattcaaaagtgtacactttgtcccaggaaacattcatacagaacgccagcattgttacataccactggagtatcactgaatatcaatgattaaaaaaatggatagcctagtcaaaaaacagacaaacaaacaaaatcctgtcaattctaaaggaaagaaattaaggtagcatatcatttctccaaagtaacagtcaaagttggaatgtaatgaagaacatgcctgcagtctccgggggaagaaatgtgatccaaaattgttgaaactatctagactattattcaaatataatattcatatataaagttaagttggcaatctgagaattcaaggaaagttacaaacattagccattgttgaagaaagcagacttcagagttttgttttgtttgttttttttaacagaagcttttttaagaaacagacttcagtcaacaaaaagaaaaataggaactctgcagtctataaactggtggttaatattaaatgtatttaacaataggtctaagactaaaacatttgtgaaaattgtaagtatgaaagaaagtgtaaatgtttttaaaatctcaaaaggtaaaatgtttataattagcaaaaaaaggagataggaggacgtatgtgttgatttcctcatcttctatagctgaatgttaaaagatattatttaaacctgataaattacataatgggggtataagtacacaaatcagtataaaagaaagattaatataacataatcaaataaattacatggtataggagagagagaaaagggaaaagaaacaggaatatactaatttcattgtgcttataccagggaattagtagacactgactaaaaacagagtattggaactctacacaaagttacagttataaaagtaaccctagaaaaaaatcttctaaaatataagaggaaggatgcatacaaaacaaagacaaatgtagcccttacagtgaaaggctatttcaaaacaataaaagcaaacagtataacataacagaacaaaattagtaccaaacacacttacaatgataaagccgagtgggccaagctcatctagtaaaagaaaagaatttcaggttggatctaaaaaatacaactctaggctgatgccaaaatatacagccaaaaccaagttaattagaaagggtgaaaggtaaaggaataccagtcagatgtaaacgaaaataaagcagggatcataatcttaatataaaatgtgtttgaattcaaaaaagtcagtaaatgaggaaaagaagagcattttataaggggtgcaagaagatgtaataggtatgaaaacgaatgtcctaagtatatagcattgatacgtaaagcaaaaagcacaggatgttcaaagagaaatagtcagaaacagggtaacagtggattttagtgactttcagtccatataaatttaagttggcagaataaaggcgataaaaacctcaatatttttcaagaggtagaaccaattgacattgtacaccttccttaaagtgcccatgaaacatttactgcccagaaacagcatatataaaaccagaaattcagcaaacttcaaaagaacaaataatacaaacaatgatatatgatcacagcccaatggaaagaaacatgattttaaaaataaaatccaatatttaaagaaatccttaagaaacggttggaccaaacagagaatgaaaactaaaactaaagaatatctgcaggagaagaaaaaggagataatgacagcagcacattttaaaaaatggattaaatcagtgttcagaaaagaattcgtagccttaaatgagtatatccacaacaacgaaagaattaaatgatccaatcaagacattagaaaaggaaccataagaaaagtcataataaaagcaaaacttgagtagaaagaaatacagagctaataaacaagttcaagaaatcttttatgggtaggaaaaggggtacataaacttgttaaattttttattaattcaatcaataaaaagaaaatacaactgtataaaacaacaatttataaaggaaaataatcacaattacattaaaagattaaaaagtacttacaaagtcactttaccccaatctatattttttgaaaaattggacataattggtaaaatatgattaaaaatcatgtgaaaacttgctcgagaaaagttgaaaaaattgaaacaagctaattactatgggaaaaagatacagagaaagttgttcaaaaagggactccattccattacactaccaccaacattccgccatccccaccaaaaaatggaaaaattgtgttaaactttcaaggaatcattttttccaatgttacttgactgtactgggatattgaagaaggaaagcttttcaaattacgtttatggaaggggcataacatctggttcttttctttcactctctgctccctcagccagtagctgccccctctgggccctgcagagattcccttttctacacaggttcattttatatctgcaattaaggcagagcagcagttatggacaccaggcagagctggtggaagcctcaaagctagaatcccaaattaggtccccataaggtggtggctgtcggatttgggagatgttgcatagggtgtctcctaaaaattcttaaatcaacaattcctgttgtatcaccctctgagtctaatcatcgacttaaaaatcattcactataaatactctgtgaattgacatatctataggagcagaacaattcccttacatattaagtaattaattaaactacctctcatttgccctttcccatccactttaactcaggttgtaaggttttacaccctttgattctgtatcttcccatctttgttctaaccatttactttatctggaacatcctctaactaattctaagttctcaaatcctttggctcaattaaaatgtgcttcctctgtaaaggttttcctggtcctgccccatctcatattcctgtccactaaactctgcggcactttaattgtatactttacggctcttagctctgttaacctctcacacggacatttctctatagagcacacctcctctactccattgtggcttgccaacagatttctgccaaattcagctttgcattcttaatgccttgtgtcacactttgcatacagtagggttcaatatttctgaaataaataaataaatgaactttgaaagtatgaccgtaagagcaacaatatttcagtaaaagggagcatcagattgggctgtaggagttgggaaaggctttctggatgagctggagtttgtgcaacacgataaaagattgatacgatttaagggaggtgcaagtgtgaggaaaaggcacagaagtactgctgtaggtgtctcttctccctttatctagatggcgtggggtttctttgttgttcttcttttttattagtttcttctagagtcaagatagatggggtggttctgaggactcatttgggaatagttaagacattagttaaaacaatccattcacggagatgtctttttgatagaacatctcaaaagaatttggcaattaggaatggtagaccctatgaataaataagaataggctagaagagtacaccccacagagatgccatataacccaacaagagtctaggatgaacactggtctatgtttccaagaagcctgtcttacacaggatcacagtgatgacctcacctgtagagactcacctggattaccactctcaggcatccagcttgaggctcaggctgcccttattgagtgatcctggatccctgctccaacattccaactaagtcctttatgcatctgatgatcgtgactcaatacaaccctctgttgtaggaacctggttcagcgttgctccccgagaaatgggtccaggcaggaaggttggattctctgagtgccctcctactcacttcagtaaaaagagaaagcaggcctcatctaggaaggacgggcattggcaacgtgccctggcatgggagagtcccagatctttctctcacttgatatgttatctcgaacaagactctctttctctagtaagtcctccatgaaataagagatttgaccacttggtaacaactcaaatgccacctctattattagggagcagaagggggcccccggagagtcctcacctcgttgtggatacagaggccagcaaggtttctattgaagggaaaggaagcgggtgaagcactgtgcaggcctgtgctccggagagcaaagaagggccatatacgagaaaacgagtgagccagaaatgagatcatccagtcatctatccactgccgtgtcagcctctggggatctcagaattagcccttccaggaaggttcggaggtttagggagccacagagcaataaacaacccaagcttttaatgaacccaataatgatgccttatgactttgtgatgcttttgattttctcaaagaggcctcccctccaactccttactgcacccctcatattagtttcatgggggtaattagggagtattaataatcccatttatcataccacaccaatgaagtccagagaatttattcatcttcacaaagccacagtggatctaatggtggtgctgaggctagagtaagtatccagacagagcgttgttctcccagattcctctcggaacaagagttctgagcagagagagctgactctcaggcttgccctggaggtgagaaggaggcacaagaatggagacaaaagggagaagctttctccaaccttggctttctaatgagtcctcaggaatgcagtgctttctccctcaggaccttgttaatcgggggcactggggggcactggaattgcatcttggggaccccatcatgactttggaattggtggtagaagagctgagttcagttaggagggaccaaggggtcctgagggacgtctcttcccactgtaattctctaggccaggaccttagaagttgagactcttggtgatgaggttaatgaacggcgaatgtggagaggttgccgagccctccctcaatgtcctactccctgttcaaacaggaagtgcccaccatgatggagaccttgcatttcctttgctgcaaaacctccagcccttcacacttccccagaagagcctggtaagaaaaacactgacgtggtgtacactcacacttgcttttccagtgactgacggcgtgccttaggaccagctgctcagcaactctggccttccatttcttcatgtgtaaaaacagaataatatttccaaccacagagggttggtctaagaattaaataaaataatagttaaagcacttggtaggggatcaacaaatattaatactaataaaatggcaatcattaatatttgctttattttggtgcattatcttaattttctggacaactctttgacatggctttgttatttgctccactttgcagaggaggaatttgaggctcggggaagtttagtaacttacttaatgttacctatctaggatgtagcagagctggacctcaagccacaaagcatgattttaacaacttttctataagactttcccttccctcttttttttttttaatctgcttcaaaaaacaacttttatgacatcatctgatcactatgactgtctctgccctcaagactctgacttttgtgccagccttttcagcttcttctagcaaatgtaaattaaaatcacaatggaggctgggagcagtggcttacgcctgtaatcctcacactttgggaggccaaggtggggggatcacctgaggtcaggagttcgagaccagcctggccaacatgacaaaaccccattgctactaaaaatacaaaaattagctgggcatggtggcacatgcctgtaatcccagctactcgggaggctgaggcaggagaatcacttgaacctgggaggcagaggttgcagtgagctgagatcacaccactgcactccaacctgggcaacagagtgagaatcggtctcaaaataaataaattaattaattaattaaataaaatcacaatagagacactattttacatgtactattggcctaaatgaagaaacgacataatatcaagttttgatgaaaatattgagcaacaaaaatttttttcttttttttttaaattatactttaagttctagggtacatgtgcacaatgtgcaggtttgttacatatgtatacatgtgctgtgttggtgtgctgcacccattaactcgtcatttacattaggtatatctcctaatgctgtccctcccccctccccccatcccacgacaggccctggtgtgtgatgttccccttcctgtgtccaagtgttctcattgttcaattcccacctatgagtgagaacatgcggtgtttggttttctgtccttgtgatagtttgctgagaatgctggtttccagcttcatccctgtccttacaaaggacatgaactcatccttttttatggctgcatagtatttcatggtgtatatgtgccacattttcttaatccagtctatcactgatggacatttgggttggttccaagtctttgctattgtgaatggtgccacaataaacatacgtgtgcatgtgtctttatagcagcatgatttataatcctttgggtatatacccagtaatgggattgctgggtcaaatggtatttctggttctagttccgtgaggaatcgccacactgtcttccacaatggttgaactagtttacagtcccaccaacagtgtaaaagtgttcctatttcttcacatcctctccagcacctgttgtttcctgactttttaatgattgccattctaactggtgtgagatggtatctcattgtggttttgatttgcatttctctgatggccagtgatgatgagcattttttcatgtgtctgttggctgcataaatgtcttcttttgagaagtgtctgttcatatacttcacccactttttgatggggttgtttgactttttcttgtaaatttctttaagttctttgtagattctggatattagccctttgtcagatgagtagattgcaaaaattttctcccattctgtaggttgcctgttcactctgatggtagtttcttttgctgtgcagaagctcttgtttaattaggtcccatttgtcaattttggcttttgttgccatggcttttggtgttttagacatgaagtccttgtgcatgcctatgtcctgaatggtattgtctaggttttcttctagggtttttatggttttaggtctaacatttaagtctttaatccatcttgaattaatttttgtataaggtgtaacgaagggatcaatgtgcaaaaatcacaagcattcctataacagacaagcagagagccaaataacaccagtaacagacaagcagagagccaaatcatgagtgaactcccattcacaactgcttcaaagagaataaaatacctaggaatccaacttacaagggacgtgaaggacctcttcaagaagaactacaaaccactgctcaacgaaataaaagaggatacaaacaaatggaagaacattccatgctcatggataggaagaatcaatagcgtgaaaatggccatactgcccaaggtaatttatagattcaatgccatccccatcaagctaccaatgactttcttcacagaattggaaaaaactactttaaagttcatatggaaccaaaaaagagcgcacattgccaagacattcctaagccaaaagaacaaagctggaggcatcacactacctgacttccaactatactacaaggctacagtaaccaaaacagcatggtactggtaccaaaacagatatatagaccaatggaacagaacacagccctcagaaataataccacacatctacaaccatctgatctttgacaaacctgacaaaaacattccctatttaataaatggtgctgggaaaactggctagccatatgtagaaagctgaaactggagcaacaaaaatttttatacactgctggtgagatcataaaattgtactatcacatgaaaacacaatttgggctttattctttaaatatagttgcactaattccgttcctaattagagacccaaaagaaattcttgcacatgtacaatcctacatgcctccacctgcaggatgttgaccgactgggaaagggctagtggccacatttcatctgcagatgctttgctgttggtctcgtcaaagtgcctggtatctgtcatgcactgtgtgagcctagggctccatatccaatgtcatgctcattctgggaaggccagtactcagttcgggctaaaagcggctgccacccacagtacaactttctatctcactaggctgcccctgttcatcacaacatattttaaaggaatagtaatttaaatagtgttatatttgagcaaaattagagaaatcaaccaaaataacacattagaggacctgtaaataatatatggaaatttgatccatgacatggtggccaatagatcagtaggaaaggacaagtctttcaataaatagtgctggagcaactgaggaaccacaaagaaaaaaatgatattatatgtctttctcacgccatgcataaaggtcagtttcaggtagatgtgatacttatactgaagagtaaaaatgtaaatcattgaacatattctgtggaatatctttataatattttaggaggtaaatatttcttaaataagttgaaagaactttagttatctaaaaaataagacagcaatttgcctacactaaaatttcaagcctctactcatcatatgacaatgattttctaagtgaaaaggcaagctacaaatttgattttcagcatatatagctgttctgaagtatccaaaatatatttcaaacttctacaaccaggccaggcatagtggctcatgcctgtaatcccagcactttgggaggctgaggtagacagatcacgaagccaagagatcgagatcatcctggccaacatggtgaaaccccgtctctactaaaaaaaaaatacaaaaattagctaagtgtggtagtgcatgcctgtagtcccagctactcaggaggctgaggcaggaggatcgcttgaacacggaaggcagaggctgcagtgagtcaagatcacaccactgcactccagcctggcgaatgagcaagacttcatctcaaaaaaaaaaattagccaggtgcctgtaatcccagctactggggaagctgaggcagaaggatcgcttgaacctgggaggcggaggttgcagtgagccgagatcatggcactgcactccagcctgggcgatagagtgagactccatctcaaaataaataaatagatatagatatagatataaatatatatattatatatatatattagaagttttggtactaatatatatatatactaattattatactaataatatatatatatatatatgtaccaaaataacagtaagccaaagtaacagtaagccaaaaataaagcagactctacatgtattgcagcttggctttgattagggggactgagacaacactctttgtaggactctacacaacctgtgtgatggctggtgagcacatgaaccattcttggctctacgcctcagagacttttccttcctactgccttatagtgtttttctctccggatgttagagttttctctcatgcacacacagattccaatgcagccaaggaccggcgaagacccacctgcaggactctggagctgtctatctgtgaagctccctcttctccagtactttccctcaccaattcgtgctgccacagccagcctgaactctgtctcctcaattcagaagaccactgggctctgtttgggttctccttgccctgggtgtggttggccactctttctggcaataagctgaggcaactgtatttctcacactgctctagaggtaaggattcaccgtcctgccctgcatggtatccactgcttcatagattttgtttggtttcttagctgtttaaaatgggagagtaaatctggtccctgtcacttcatcatcatggccagagtagttttctaaggaaatacaatttcccaaaactgtttacgaagaaaaagaaaatttaaacagaacaaaaaacagaaatattgacaaagctttggtcctcccttccttcaaaagcctgcggtccatatgatttcataggagaattctaccaatcatttaaaaacaaactaggtatattcatacgatggaatacttcagcaataaaaaataaactattgatacatgctacaacatgaatgactataaaatccattatgttgagtaaaggaagccttacataaaggcatatgcactgtacgattccacttatataaagttttagaataggtagaattaatctatgttgaaaaaatcagaacaataattgtttttgagtagtcattttttaactggagaaaggtacggggtaacatttttgggtgctggcaatgttctgtattttggtaagtgtatgcatttgtcaaaactcagtaagtgtgcacttcacatttctgtgtttcactgcatattaagtttgcataaacaacagacataaacatattgaagttgtgttatgatatgcatgcttaagtatttagggggacatgtactgatgtctgcgtctagaggggtggagaggtatgtcttcgtttttttccttcacagttgacagagttaaaatacctctgttaaccaccaatccaccaggccttgaagccaatcaaaactccccttgaaacaaagatataggcaaggaatatgaagaatataagcaggggatatgaagactacatgtttccctgccccttatataaaatataactgagtaatttttacttttgtcatgaggtaacaaggaatctagtcttgggaatgtagagtatcaatggaagagacgagatccttgcacaaattagggaggtagagattactcatgacataggacaaaaatcagagatgcaaatactttgttgtattattattcataatggcaaaaaattgaaaactaagtatgcaatggttaagtgaatgttagcacatgcaaatggtagcatattagaaaatcataaaattttgaagaataatatattacacgaagctcaaatataaagacagtaaaagaaagttgaaaataaaattctattaaatatcataccttttgtaataaaattctattaaatatcataccttttgtaaaccacaaatgattagacgtgtgtggacacgtgcataggaatagtgattaggtggtaattatttggttcgtgccttccttctttatgagctgataagctccatgtagggagggagcatgtctgtatttggtcacctctttactagcatattacctgaaaaatagtactgtgctcaattaatagatgccaaataatgagtggcaggatcctatctctgttaagcaaggtgaagaggagcatttggtgtgcggaacaagcagctctggatactcaagaaggtggttcagcagctcagtggaagaacaagccaacagtggctgagctccactggaggctctgccttttttggttgttgtttgtttgcctgtttttttagagacaggccttgctctgttacccaggccgaaattctatggcgccatcatagctcaacgcagcctcaaactcctggcctcaagcaatcctcctaccttagcctcccaagtagctgggactacatgtttgtgccaccacagtcagctaattttttttgtagagacagggtttcattatgttgcccctgatctagaacgcctggcctcaagcaatccccccactccagcctcccaaactgttgggattagaggcacaagccaccgcatccagccacccccattttgatgaggttacttcctcatccaggaggcaccagatgtaatgcagttacctagatgctcccactcccccttccaattcctacaaatatatagagtgtttgtggggggtggggtccctttctactgaaaagcttgccatagtgtgtgtagtctagtgacgctcaaccttagcccctctccatgtggaatagggagagtgcaggggatcactgtgctctactactcttcaaaaaaaaaaaaaaaaccgtaaccccttttattttctccacttaaaatcaaatagaaaacaaaaaccactaatatcttcaaaagacattgttagtgtaagagaaagactaagaaccacttaaaatcaaatagaaaacaaaaaccactaataacttcaaaagacattgttagtgtaagagaaagactaagaacaaaaattgggtttatagagtcaaacataagtgagtgtcactcttatacttccaagtttttccacaacaaggcatgtggttcaactggatttacacacgcacgcgtgcttgtgtgtgtgcgcattttgtacaaaaggttttgtacatcttgggttcctgtgggatgttcaggtagaaatatccaacacacaggcattagggtcaacaacttagtgtctgggagggagataaaaactgaggatcgcctgcatgtactgcctttggattgctatgggaagacagaggaaggcctcctagcctggccccagggactcataggcagtttctggaaaggaggagacctgcaatgagtcttcaaggaggaagttcccttccttaacattgtgtcagaaaaggagacgacacagcctccggtatgtcaggagaaagcagaaataatgggttctatttgagctctgcaacttagcctcttacaaggacagctgtcaacagaaatcccaatccatcctaattctctgacaactcctccttggcccatgacaggcttaagccactatgagtttcctcaagtgatcctgcaaagagcttcttccaaacctgttaatgagagtcagtgagaatgcttaattaatgaacaaggaattaaaattgcagttgatgtctgaagccaccattagatgttagtgaaagtagatggtcctgttctaaaagtcctctaaccctttatcttcctttgtggtgttggaggcatgagactagaaaacattttgagccaggatgctacaggttctagattacactgtgggagcccagaaaaaggcaaagcgcttgactgagactagaagagaagccgggcttgaggatggctcacgtgagctgtgatgggaggtgaccttgtgagatgatggcaagaacactgatccagggatgaaacaggaggaaatcctgacctaggctctggcctcctcccagccccatgctgcaggccaggtgagaaagtcacaagtcactgctcctctcctctcctgtccccacccaagatgatgggctggattaaatcagaaacccaaaatctcaacaccgtccccaacacaaggtgactttcaggattttaagtctttgagatgttcattttaactctataaaatgttgattacaagagtgccgtttcaccagtgctcaaaaatatttttgttaaataaatgaatgaattttgccatattgaagaaggctgtacttggaaacattttgacaagtccataacattttaaaaatatttgaggtcattatgtctttggcaaaggcaggtgtctttacctggttctggctccccctggaaggtgctaatttctgaggcctccaggggaacaatgaggaggagaaaaatcccagtgtgaaaatgatgtcagcggagttgcttgtccctttgtctgtctgtcctttataagccatcccctctgcagaggctgctgggccggcgggactgtccctcctcctctttgcccatctctttggccgggtgagtctcatctcaagactcctcactgtactctcacagcttggtctccatacaaatgaagttcaccctctgggctctgaaacagcttctcactccacccaaaaagatccagtgggatttgggtgcttcaatgtgcagggttagagagagggaagaatcagtaatgactaagctttcaagcgctactcacggggaggatggcaatgctgctaccaaaatacttagtccaaagcagattgagattgaagaaggacggttctgatttggagagactgagtttgaggtaatggtaagagcatgtccatgcagaaaaggccatactattagatggtaattgaccctctggagacctgaggacggcattctccacatttaatcattgggaaatatcttcctctgctcatgccttttgccccctagtggtctccaactccaccccttccctggatgagttagcctccatgtgagagacttaaatatctatccctcagccagaggttgaggtggatcactgagtattttattttattttttgagactgagtctcgctctgtcacccaggctagagtacagtggcgctgtctcagctcactgcaacctccacctcccaggttcaagcaattcttctgccccagcctcccgagtagctgggattacaggcacctgcaaccacacccagctaatttttgtatttttagtagagacggggtttcaccatattggctaggctggtctcgaactcctgacctcaggtgatccacccaccgcggcctcccaaagtgctaggattacaggtgtgagtcaccacgcccggccgagtattttattagcagtgattagggctgggaaaagaaaagcattacctaagtgatcatatatgtgggcagttcatggcactgtaaaagactttggccctatctggtgatcagataaatagcatgtgtgttggatgatgcgtaattagaaccaggagacagaagagtgaaaagctcagtgatggtggagttggaggcatggggaattcagggtgtgggtatctgcttacctaagactctatttgtgtgagagttcacctgtatattcaatgaaacagcgttacttggtatccaccaaacccacctgggagcctaagcctggagactcaccctactcaaaagccctttttacattcttcatatttggtaaacggtcagtacttttgagcccaaatttcccagactctatacggagaaatgcaatgtaatattactacttggaaaatctaaaaggctggtagtcaccagctatggagctggaaatgtcctcggtgatgtttcctcgtttagtttcactgtttttcatctcatttcgctttttttctgaaatgtccggaccaaatctcatggcctcgcatgttaatcttttaatagtctgggccacgacaggcatctcactactgccatggtgtatgacagcacgtgtatgcggggggtgcagggacacaggttgtggggagcatgctttcctgcttccccgaagcttccctttcatcctctgggatcttgtgtacctcaactatggccatgccaccatctgtagacttggggtttcctcccagaactttggcctcaggaaaataatttttccctttacctttctaatgtaacatttgttcccctttctacatcaattcatggatctctgtttgagtctgtccaatgccactcttgttacccattaagagtcagatatcaagtcttttcatactacatctaaatcttcaacttccttccccttacatttcatgcgttcttccatcccggccctgtcctggacattgctatcaagatctcattgatgattgttatcaacacctcatcctgcttctgccaccaccggccccatctaacactgctcagtccactgctagtggaagacagccatggatctggggaactcagggaatgattcagttgtgaccaagtttgtcctgctgggcctcacagagactgcagctctacagcccatcctctttgtcatcttccttcttgcttacgtcactaccattggaggcaccctcagcatcctggcggccatccttatggaaaccaaactccacagccccatgtacttcttcctggggaacttgtccctgccagatgtggggtgtgtcagtgtcactgtccctgccatgctgagccatttcatatccaacgacagaagcattccctataaggcctgcctctccgagctcttcttcttccacctcctggctggggcagactgcttcttgctgaccatcatggcctatgaccgctatctggccatctgccagtccctcacctacagcagccgcatgagctggggaatccagcaagccctggtgggcatgtcatgtgtcttttccttcaccaatgcactgacccaaactgttgccctgtctcctcttaacttctgtggccccaatgtgatcaatcacttctactgtgacctcccacagcccttccagctctcctgctccagtgttcatctcaatgggcagttgctgtttgtagcagcagctttcatgggtgtggcccccttggtcctcatcactgtgtcctatgcccatgtggcagctgcagtcctgcgaatccgctctgcagagggcagaaagaaagccttctccacgtgtagttcccacctcactgtggtgggcatcttctatgggacgggcgtcttcagctacacaaggctgggttcagtggagtcttcggacaaggacaagggcattggcatcctcaacactgtcatcagccccatgctgaacccactcatctactggacatctctgctggacgtcgggtgcatcagtcactgttcctccgatgctggcgtgtctccaggcccaccagtgcagagttccctatgctgcctgcagttcacagctcttctttccccacctcctggctggggtggactgtcacctcttaatagccatggcctatgaccgctacctggctatctgtcagcttctcaccaacagcactcgcatgagctgtgaagtccagggtgccctggtgggaatttgctgcactgtctccttcatcaatgctctgactcacacagtggctgtgtctgcgcttgacttctgtggccctaatgtggtcaaccacttctactgtgacctcccacctcttttccagctctcttgctccagcatccacctcaatgggcagctgctgcttgtgggggccaccttcataggagtgatccccatgatctttatctcagtgtcctatgcccacgtcacagctgcaatattacaaatccgctcagctgaggggaggaagaaggctttctccacatgtggctcccacctcactgtggtctgaatcttttatggaactggcttcttcagttacatgtgtctgggctcagtctcagcctcagacaaagataaggggattgggatcctcaacactatcctcagtcccatgctgaacccagtcatttacagcctccagaaccctgatgtgcagggcaccctgaaaagggtgctgacagggaagaggcccccagcttgagaagatggggttcaaaatgcaacctccctcctcgagcaaccccccgactttcttatgctgaaggactaggtatgggcaggaaaaatcctcagcgtcgggtcataaaatgggaggaaagtagatagtcttggtcagggtagagtgtggtctgccttggattgaggagaaaggcaaaagcttaggtgagagagtatctaagttactgatacaaagtgaattgaagacaagagaaaaatatgatgtgggtcaggtagcgggagacaaactattttgtatttttttaatttaatgattgttcaattgaaacatatataaaatgttaataaaaatgaaatgtctggcctcctttttagcaaaactatatttgtattcgagtgttgggtgtgatttttaaaaggctctactttaagaaataggtctagtattgtaaagttaaatttgggcttgacatacactaggagcagagtgttggtacttgtcagagcaccctgcaagcaccttcttcagagcaacatcatcaaacacctgttcccaaaactgcagcccctttctgactacttattagtagggacaacacaggtacatggcagtgcatgagcctattctcacaacctgcccccgccccctgaccagaaacataagaatgtatcactgtatgttccctgagaagaagcattaataactagtaagatagatttatttatttatgagatggagtttcgctcggtcgcccaggctggagtgcagcggcacgatcttggctcactgcagcctctgcctcctgggttcaagtgattcccctgccttagcctcccgatagctgggattacaggtgcctgccaccacgtccggctaatttttgtatttttactggagacggggttttaccatattggccaggctggtcttgaagtcctgacctcatgtgatccacccgcctcagtctcccaaagtgctgagattacaggtgtgagtcactgcacctggccataagttttactttcaatggcaaaatacactgatttatgttggacattctgtttaattcatacgtacagataattagtaaaggtgaggagactgataagaaggggaaactagaggggaatatcatttgcaatttatcaatgagtaagtactggaacctgagattttaacaacagagtgaaattacggcaatccagagagaaataatagaatcatagtcaatttcgtgcactatcgtggccatttctagaacttattctgtaaatccttcaggcacttcctggacaagaagttggaagttgaagactcaccttgtccgacatgcttattatttgaggagggcagcagggaacccttaaggggccttagattatctcagcacacagaggtatccacagttattctccacatccagccatccgttgggtcccactgaacattatgctggactctcttacaccattgtcctctggcagacagctgcctcccagctgggacccatgccatccaacagtctctgagccctgggctcctccctaactcagtgctgtctacactgccccattaatcccctggaacaatatctgctcagtgtcatttcatctgccaaaggctgccaagtctttctgatcaaatctagacctttctcaggtaggcaaagtcttccatcattccttcctggcttctccactcaatcttcatctttcaaccacgggtgctcacttaggtggctcatgaagcccttggtttgtattcagtgttcttaatctcctctgaaagagtgtagcctacacagcatgacagcatcataattttctctgtattcctccagcttcttttattcttcccagctaggttataatctccttaaggacgggatccatgtcttatattatgtcttccaaacacacaacagagtgctgagtagatagctgatgttcaagccatcttgtgggttatttgatagcagaaagcatgacttatgataagaaatttgtcttccacataggaagtcagtgaaactgctagatgttttcaaaatatcctcaaggtcccaatattaggatagtataaagatataaagagaaaattttttaaagataaattttcttctgatgaaataaagacaatcattgaatttgacataacagggaaaaggcttcctaactttgtgcatgaaatgcaatatcatttctcctcaaacaaaaaaaccctgaaactaaaaccaaagaagtacctccttcttgcaaaaaattataaacagagcatttaattagcaaaatctgagcataacactataggttgggaaatcctataatatccaaagacttgggaaagcattacagagagaagtgtaataataaatgagtgatcacaagttgtgtcagtgtttgtctttccttaattcatcttctaaagtaaagagtttttaactctgctatgcaaatataaataattcatgttttatgtaaataatttaaataaaaagcatatatttgtttaaaaagaagagtgaacgtattgacatgagaagttgtatagcacatatgactaaattgagaaagtgatgatgatgtaaacatgtgtatgggctgaaaatcctggaggaaaacccgtaagctgcacacggtgattccctctgtggagggaataggactggggagggcagtggaaaatggggaatgactttcggtttttactccatttactctggtattattcaaagtttttcactgagttctgtaattttaaaaaattaaatacatatattttttaaatttccacttttactttagataaggagatgtatgtgcagatttgttacttggtaatactgcatgatgctgagatttggagtccagattccatcaccttggtcatgaacacagtacccgataggcagttttttaatccacaccttctccctcctctttttagtagttcacagtgtctcttgttctcatatttatgtccatgtgtactcaatgcttagctgttaatgattagaacgtggtattttattttctctttctgcattaatttgcttaggagaatgacctccagctgcatccatgttgtggcaaaggacattatttcattcctttttatggctgcatagtattccatagtgtatatgtaccacattttccttatccagctcaccactgatgggtacctgggttgattccatgtctttgctattgtgaatagctcagtagtaaacatataagtgcgtgtgtctttgtggtagaatgatttactctcctttggatatgtatccagtaatgggactgctgggtcaaataatagctctgttttaagttctttgagaaatctccagactgctttccacaggggctgcacaaagttacatttccaccaacaacgtagaagcgttctcttttctctgcagccttgccagcatctgttgcttgttgactttttaatagtagccattctgactggtatgaagtggtgtctcattgtgattttgatttgcattcctctgatgattagtgatgctgagcactttttcctgggtttgtcggccacttgtatgtcttcttttgagaagcgtctgttcatgttctttgcccattttttaatgagattatttgatttttgcttgttgatttgttgaagttccctataggttctggatattaggcctttgtcagatgcacagtttgtgaatattttctcccaatccataggttgtctgtttattctgctgatggtttattttgctatgcggatctttaattaggtcccacttgtcaataactaactaaataaataaaacttttaaagtgctaactggtgaaaatatgggggggggggcggtagtaagatgagtagtaagatgagtctactatagtgttttctctccagccttcagagtgtcccgtcatcctcacctttaaggaaactagtgagttgtcccatctatccaacacaagcccaccttgttcacttgatcaagatttagaggcagtcatcttgtccatctctcttcatctaagtgaagaatcaaaccaaacagctcttatccttaagagaatagccctggtggaccttcttacctctttccatctcctgtccctgaagattgaaatatcaccctccactccacaccaaccctcatcctgcaccaccatcaacaacctgtccccccagcacccacttccctattgcacagttttgaatctttatatgaaattccagtcaaaggtggtgactaatcttggttgggatgaatgtatgatctttgcagatataagtccatggattcctgacactaaaagaaacttctagcaaaatttttgcccagccatcctaactgagatagctcatattcaaagaaacatgtttcagacattgtgagttctcaacacatctgtgaactgttgagtacatccacgatccatgtgtcaagctcagcagatgtcattttacacaccatgggcatctacatatgtctacttggagatgatctcacacacatcccaacaatacctccttctcccacatccatcctaccatctgtgtccagcccagagaaaagctctactaggactcagcagaattataacagtagtatattttatcttattattttattagcacatagcaatatttacaaagcaattttaaaatctgtgttctcatttgaatttttcagtggcacagttgaatgtaacccacagtgacaaccaggaccaggattagaaaataggaaggccagcttttattattctcacttcacagatgacagattcggtgacttgccagaggccatagagttaggcccagtagctttgcctccttccctgcatccagttaatcatcaaagaattcaaaactaaacagagtgataatgactgtgggtgcaatgagtttcagaaatgcaaaaggcagtacagttgaatgaagagaaccttcaacagaatatatggagatcaaagttttaattcagtctctgctatttttagcctacagatctgttcaagttttgattctttatctacaaaattagtcacttccaagtatctcaggcttttttcactcacctactacatagtaaatactcaagcccagacaggatgccaaagactgcagggattaagagactatgagctattaaacggacaggcaataaggttgagtaccggtgcataaacccagaaactatttatacagtggatcagatgagcagaagttcattctggggcttcagcagctggagagatgccagaattggaggtggtaacagtgagccaggaagagacgtgaaggcctgagaagtagcaataagtgaaacagaaagaggtgagctttggaaagagtcttgaaacatcagccagaaaatatttaacctctcttttagactatggttgtaaaatcttggagggtaaagatatcagggatctgaaagggttacctttatttggtatttacaggtagttgtccaggccagaatataaggacaaataaatacaaatccagcatcttctgtgtggcaggcagcaagctgggaagctcacgcaccttgttgcattaagttaactttggtcaagtgaacatagcattggagtgagaagttgggaggccggggctctgggctaacactgctccttgctagctgtgtgacacagggtagatcatttcctccctgtgggccccagttttcccatccataaaataggaatgggaatcataccatgaacttcatatgattattttggggactaaatgaattgaggtacagaattactgagtcaacaagtatagtgtagaacatgttaaaatttcattgggttttgagttgaaggagttaccctatttcgagagttgtgccctctctctaacaaaagccagagtaggaatttatctccccaggcccaaaactctacccctcccggccagtgctatgccctttgtaccacactagccctcactttccatgaatgaactagtgaagaattcaggcctgtagaagccacagtgtccccccgctctctccacactgggagacagcatgattaatctcttgggatccacaccacttcagtttattttggcgttttagttaagcagcaactcactgataaactttgctaacttccccagttcaacagggtctcgggagatatctatccagcaagtcttcaaagaaaggttcccacagagacagccagggctaggattggggagttaagtgcttacaagttccacaaacagaatcccctaattagctcccaaatgagagttcaggataatgcagcctaggtgctgagggaagactgggaatttcctgactgtcttctgtgtctctgctaataaggccagagggaagggatgcacagaaagagattcactttctttttggtccttagtctgaaagaaactgggaccttagagagtggaagaggccaattagtgatgggggagttcagtacttttgttagcaagactcattagccaagttgtgactagcaggaagatgagtttaaaacgagaatgcctgggcatgagtcagcctccctgtaaacgctagcctcccctttatttgcttgttgtctgcttatcgagaccgcattcctccagcctccttcacaccccagaacttccttgttcttccactgttcttcctacccagcacagcctgcttactttttagttccacgtgaataaatgcatctgcttcagtgtttgcaatggctacatcatttgacaactgcattatcaaccctctatcttcaccctttaggttgtttccagtttttcactattaagaaccataatttgatgtgttttttccacagctatttccctaaatgggccacatgtatgtgtatattttcaacacttttatgaatattgacaaactatcaactagacagattgtaccaccaattcagtgcgagagggccactttcctaaccctaaccaaccctaagtattgccatttttaaacatccttacaatgtgatcagtgaatctctatttcctattgtagttttactttgcattttttttaaataaaccctattctatagctttaaatgtaaacaaaacaactccctccattttcaagtatgtcttaaacctccattgcttttacctgctacatacacaccaaatcatggtgtacactggtgaataaatgataagtagtccatagcctttactatcattgaaaaaacagtgtccctccactaattaattcatttatttagcaaacattatgattctactgtatgcaaggacaatctatatgaatatacactaacttcagtgtattccatattgttgggttattgagtctgagggattagcagatttatttgtaaaggactaggcagtaaatattttaggcattgggggccacatatatctctcttgctgctgctgctttttaaaatttatattatttttattttttattcatttttttaaattttattattatactttaagttttagggtacatgtgcacaacatgcaggtttgttacatatgtatacatgcgccatgttggtgtgctgcacccattaactcgtcatttagcattaggtatatctcctaatgctatccttcccccatcccaccaccccacaacagtccccagtatgtgatgttccccttccgggtccatgtgttctcactgttgaactcccacttatgagtgagaacatgaggtgttcggttttctgttcatgtgttagtttgctgagaatgatggtttccagtttcatccatgtccctacaaaggacatgaactcatcattttttatggctgcatagtatttcatggtgtatatgtgccacattttcttaatccagtctattgttgttggacatctgggttggttccaagtctttgctattgtgaatagtgctgcaataaacatacgtgtgcatgtgtctttatagcagcatgatttataatcctttgggtatatatacccagtcatgggatggctgggtcaaatggtatttctagttctagatccttgaggaatcgccacactgacttccacaatggttgaactagtttacagtcccaccaacagtgtaaaagtgttcctatttctccacatcctctccagcacctgttgtttcctgactttttaatgatcgccattctaactggtgtgagatggtatctcactgtggttttgatttgcatttctctgatggccagtgatgatgagcattttttcatgtgttttttggctgcataaatgtcttcttttgagaagtgtctgttcatgtccttcgcccactttttgatggggttgtttgtttttttcttgtaaattagtttgagttcattgtagattctggatattagccctttgtcagatgagtaggttgcaaaagttttctcccattccgtaggttgcctgttcactctgatggtagtttcttttgctgtgcagaagctctttagtttaattagatcccatttgtcaattttgtcttttgttgccattgcttttggtgttttagacatgaagtccttgcccatgcctatgtcctgaatggtattgcataggttttcttctagggtttttatggttttaggtctaacatgtaagtctttaagccatcttaaattaatttttgtataaggtgtaaggaagggatccagtttcagctttctacatatggctagccagttttcccagcaccatttattaaatagggaatcctttccccattgcttggttttctcaggtttgtcaaagatcaggtagctgtagataggcggcattatttctgagggctctgttctgttccattggtctatatctctgttttggtactagtaccatgctgttttggttactgtagccttgcagtatagttggaagtcaggtagtgtgatgcctccagctttgttcttttggcttaggattgacttggcggtgcgggctcttttttggttccatatgaactttaaagtagttttttccaattctgtgaagaaagtcattggtagcttgatggggatggcattgaatctataaattaccttgggcagtatggccattttcacgatattgattcttcctacccatgagcatggaatgtgtttccatttctttgtatcctcttttatttcattgagcagtggtttgtagttctccttgaagaggtccttcacatcctttgtaagttggattcctaggtattttattctctttgaagcaattgtgaatgggagttcactcatgatttggctctctgtttgtctgttgttggtgtgtaagaatgggtgtgatttttgtacattgattttgtatcctgagactttgctgaagttgcttatcagcttaaggagattttgggctgagacaatggagttttctagatatacaatcatgtcatctgcaaacagggacaatatgacttccttttttcctaattgaatatgctttatttctttctcctgcctgattgccctggccagaacttccaacactatgttgaataggagtggtgagagagggcatccctgtcttgtgccagttttcaaagggaatgcttccagtttttgcccattcagtatgatattggctgtgggtttgtcatagatagctcttattattttgagatacatcctatcaatacctaatttattgagagtttttagcatgaagcgttgttgaattttgtcaaaggccttttctgcatctattgagataatcacgtggtttttgtctttggttctgtttatatgctggattacatttattgattggcatatgttgaaccagccttgcatcccagggatgaagcccacttgatcatggtggataagctttttgatgtgctgctggatttggtttgccagtattttattgaggatttttgcatcaatgttcatcaaggatattggtctaaaattatcttttgtggttgtgtctctgccagcctttggtatcaggatgatgctggcctcatcaaatgaattagggtggattccctctttttcttttgattggaatagtttcagaaggaatggtaccagctcctccttgtacctctggtagaattcagctgtgaatccatctggtcctggactttttttggttggtaagctattgattattgccacaatttcagagcctgttattggtctattcaacttcttcctggtttagtcttgggaggatgtacgtgtcgagaaatttatccatttcttctagattttctagtttatttgcgtagaggtgtttatagtattctctgatggtagtttgtatttctgtgggatcggtggtgatatatcccctttttcatttttattcatctatctgattcttctctcttttcttctttattagtcttggtagcagtctatcaattttgttgatcttttcaaaaaaccactcctggattcattaattttttgaagggttttttgtgtctctatttccttcagttctgctctgattttagttatttcttgccttctactagcttttgaacgtgtttgctcttgcttctctagttcttttaattgtgatgttagggcatcaattttagatctttcctgctttctcttgtgggcatttagtgctataaacttccctttacacactgctttgaatgtgtcccagagattctggtatgttgtgtgtttgatcccattggtttcaaagaacatctttatttctgccttcatttcgttatgtacccagtagtcattcaggagcaggttgttcagtttccatatggttgagtggttttgagtgagtttcttaattctgagttctagtttgattgcactgtggtctgagagacagtttgttataatttctgttcttttacatttgctgaggagtgctttacttccaactatgtggtcaattttcgaataggtgtggtgtgtttctgaaaagactgtatattctgttgatttggggtggagagttctgtagatgtctattaggtccgtttggtgcagagctgagttcaattcctggacatccttgttaactttgtctcgttgatctgtctaatgttgacagtggggtgttaaagtctcccattattattgtgtgggagtctaagtctctttgtaggtcactaaggacttgctttatgaatttgggtgctcctgtattgggtgcatatatatttaggatagttagctcttcttgttgaattgatccctttaccgttaagtaatggccttgtctcttttgatctttgttggtttaaagtctgttttatcagagactagaattgcaacccctgcctttttctgttttccatttgcttggtagatcttcctccatccctttattttgagcttatgtgtgtctctgcacgtgagatgggttcagcacactaatgggtcttgactctttatccaatttgccagtctgtgtcttttaattggagcatttagtctatttatattcaaagttaatatcgttacgtgtgaatttgatcttgtcattatgatgtcagctggctattttgcccattacttgatgcagtttcttcctaacctcgatggtctttataatttggcacgtttttgcagtggctggtaccggttgttcctttccatgtttagcacttccttcaggagctcttttagtgcaggcctggtggtgacaaaatctctcagcatttgcttgtctgtaaagggttttatttctccttcacttatgaagcttagtttggctggatatgaaattctgggttgaaaattcttttccttaagaatgttgaatatttgcccccactctcttctggcttgtagagtttctgctgagagatcagctgttagtctgatgggcttccctttgtgggtaacccgacctttctctctggctgcccttaacattttttccttcatttcaactttggtgaatctgacaattatgtgttttggagttgctcttctcgaggagtatctttgtggtgttctctgtatttcctgaatttgaatgtcggcctgccttgctagatgggggaagttctcctggataatatcctgcacagtgttttccaacttggttccattctccccgtcattttcaggtacaccaatcagacatagatttggtcttttcacgtagtcccatatttcttggaggctttgttcatttctttttgttcttttttctctaaacttctcttctcccttcctttcattcatttcatcttccatcactgataccctttcttccagttgatcgcatcggctactgaggcttctgcattcgtcacgtagttctcgtgccttggttttcagctccatcaggtcttttaaggacttctctgcattggttgttctagttatccattcgtcttgattttttttcacagtttttaacttctttgccattggttcgaacttcctcctgtagcttggagtaatttgatcgtctgaagccttcttttctcaactcatcaaagtcattctccgtccagctttgttccattgctggtgaggaactgcattcctttggaggaggagaggcactctgatttttagagtctccagtttttctgctctgttttctccccatctttgtggtttaatctacctttggtctttgatgatggtgacatacagatgggtttttggtgcggatgtccttcctgtttgttagttttccttctaacagacaggaccatcagctgcaggtctgttggagtttgctagaggtccactccagaccctgtttgcctgggtatcagcagtggtggctgcagaacagcagatttggtgaaccgcaaatgctgctgcctgatcgttcctttggaagttttgtctcagaggagtacccggccgtgtgaggtgtcagtccgcccctactcgggggtgcctcccagttaggctacttgggggtcagagacccacttgaggaggcagtctgcccgttctcagatctcaagctgagattttcttcttatgtgaatgcatgtattaagtatttgtcatagatgctgcaaatattttccttattaaatctgtcctactcatgctaatgatgtttttgacatacagacttttacacagtcaagcatatgcacattttactttatgacttctgtctttgctgttatgcttgaaactatttccccatctcaagttcatattgtcatctattttttttactatttttatgattttgttttttatatcttatgttttatactttcatattcaaaattcattttagtaaatgttgtgataaaggggtacaactttattttaactctacagcttgtgttcaaagatccttccaatttttttttttttttttttttttgagacagggtctcgctctgtcgcccagactgggagtgcagtggtgcaatctcaactcactgcaacctccacctcccaggttcaagcaattctcctgcctcagcctcctgagtagctgggattacaggtgcataccatcacacctggctaatttttatacttttagtagagatgcggtttcaccaggttggccaggctggtctcaaactcctgacctcaggtgatccacccaccttggcctcccaaagtgctgggattacaggagtgagccaccccaccctgcctgttctaaatgttttaagtatctctttttatcaaattttaaatgtatatagatatatatacacacacttgtattttcttctgaactttatattctgttacagcagtccgtgttagtataccacaatgtttcaataactgtagctttatttattttttctgatcaagcctctttttaaaaattaaggtatcacatctcagccttttggttaagatcaagtgtaaaaattgaggtaagatatacatgtaaaatttaccatctttactactttttctctcttcaactttcactttaagttccagggtatacgtgcaggatgtgcaggtttattacataggtagatgtgtgccatggtgggttgctgcacagatcaacccatcacctaggtattaagcccagcatccattagctgttcttcctgatgctctcccttcccctactccccctgaaggttctggtgtgtgttgtttccccgaatgtgtccatgtgctctcatagttcatctcccgcttataagtgagaacatgaggtgtttggttttctgtgcccgcattagtttgctaaggataatggcttccagctccatccatgttcctgcaaaggacaggatctcattcatttctatggctgcatagtatatcatggtgtatatgtaccacattttctttatccagtctatcattgatgggcatctgggttgattccatgtctttgctattatgaatagtgctgcaatgaacatatgtgtgcatgtatctttataatagaatgatttctattcatttgggtttatacccagtaatgggattgctgggtcaaatgtaaaaccccaaactataaaaaccatagaagaaaatctaggcaataccattcagaacataggcatcggcaaagattgttgcgggaagtcagggaccccaaatggagggaccggctggagctgcagcagaggaacataaattgtggagatttcattttaatatggacatttatcagttcccgaaattaatacttttataatttcttatgcctgtcttttttttttcttcttttttttattatactttaagttttagggtacatatgcacattgtgcaggtcagttacatatgtatacatgtgccatgctggtgtgctgcacccactaactcgtcatctagtattaggtatatctcccaatgctatccctcccccctccccccactccaccacagtccccacagtgtgatattccccttcctgtgtccatgtgatctcattgttcaattcccacctatgagtgagaatatgcagtgtttggttttttgttcttgcgatagtttactgagaatgatgatttccaacttcatccatgtccctacaaaggacatgaactcatcattttttatggctgcatagtattccatggtgtatatgtgccacattttcttaatccagtctatcattgttggacatttgggttggttccaagtctttgctattgtgaataatgccgcaataaacatacgtgtgcatgtgtctttatagcagcatgatttataatcctttgggtatatatacccagtcatgggatggctgggtcaaatggtatttctagttctagatccttgaggaatcgcgacactgacttccacaatggttgaactagtttacagtcccaccaacagtgtaaaagtgttcctatttctccacatcctctccagcacctgttgtttcctgactttttaatgatcgccattctaactggtgtgagatggtatctcattgtggttttgatttgcatttctctgatggccagtgatgatgagcattttttcatgtgttttttggctgcataaatgtcttcttttgagaagtgtctgttcatgtccttcgcccactttttgatggggttgtttgtttttttcttgtaaattagtttgagttcattgtagattctggatattagccctttgtcagatgagtaggttgcaaaagttttctcccattccgtaggttgcctgttcactctgatggtagtttcttttgctgtgcagaagctctttagtttaattagatcccatttgtcaattttgtcttttgttgccattgcttttggtgttttagacatgaagtccttgcccatgcctatgtcctgaatggtaatgcctaggttttcttctacggtttttatggttttaggtctaacgtttaagtctttaatccatcttgaattgatttttgtataaggtgtaaggaagggatccagtttcagctttctacatatggctagccagttttcccagcaccatttattaaatagggaatcctttccccattgcttggttttctcaggtttgtcaaagatcagatagctgtagacatgcggtgttatttctgagggctctgttctgttccattgacctatatctctgttttggtaccagtaccatgctgttttggttactgtagccttgtagtatagtttgaagtcaggtagtgtgatgcctccagctttgttcttttggcttaggattgccttggcgatgggggctcttttttggttccatatgaactttaaagtagttttttccaattctgtgaagaaagtcattggtagcttgatggggatggcattgaatctgtaaattaccttgcgcagtatggccattttcacgatattgattcttcctacccatgagcatggaatgttcttccatttgtttgtatcctcttttatttccttgagcagtggtttgtagttctccttgaagaggtccttcacatcccttgtaagttggattcctaggtattttattctctttgaagcaattgtgaatgggagttcactcatgatttggctctctgtttgtctgttgttggtgtataagaatgcttgtgatttttgtacattgattttgtatcctgagactttgctgaagttgcttatcagcttaaggagattttgggctgacacaatggggttttctagatatacaatgatgttgtctgcaaacagggacaatttgacttcctcttttcctaattgaataccctttatttccttctcctgcctaattgccctggccagaacttccaacactatgttgaataggagtggtgagagagggcatccctgccttgtgccagttttcaaagggaatgcttccagtttttgtccattcagtatgatattggctgtgggtttgtcatagatagctcttattattttgaaatacgtcccatcaatacctaatttattgagagtttttagcatgaagggttgttgaattttgtcaaaggccttttctgcatctattgagataatcatgtggtttttgtcttcggctctgtttatatgctggattacatttattgatttgcgaaaatacgtcccatcaatacctaatttattgagagtttttagcatgaagtgttgttgaattttgtcaaaggccttttctgcatctattgagataatcatgtggtttttgtctttggctctgtttatatgctggattacatttattgatttgcgtatattgaaccagccttgcatcccagggatgaagcccacttgatcatggtggatatgctttttgatgtgctgctggattcagtttgccagtattttattgaggatttttgcatcaatgttcatcaaggatattggtctaaaattctcttttttggttgtgactctgcccggctttggtatcagaatgatgctggcctcataaaatgagttagggaggattccctctttttctgttgattggaatagtttcagaaggaatggtacctgttcctccttgtacctctggtagaatttggctgtgaatccatctggtcctggactctttttggttggtaaactattgattattgccacaatttcagctcccgttattggtctattcagagattcaacttcttcctggtttagtcttgggagagtgtatgtgtcgaggaatttatccatttcttctagattttctagtttatttgtgtagaggtgtttgtactattctctgatggtagtttgtatttctgtgggatcggtggtgatatcccctttatcattttttattgcgtctatttgattcttctctctttttttctttattagtcttgctagcggtctatcaattttgttgatcctttcaaaaaaccagctcctggattcgttaattttttgaagggttttttgtgtctctatttccttcagttctgctctgattttagttatttcttgccttctgctagcttttgaatgtgtttgctcttgcttttctagttcttttaattgtgatgttagggtgtcaattttggatctttcctgctttctcttgtgggcatttagtgctataaatttccctctacacactgctttgaatgtgtcccagagattctggtatgttgtgtctttgttctcgttggtttcaaagaacatctttatttctgccttcatttcgttatgtatccagtagtcattcaggagcaggttgttcagtttccatgtagttgagcggttttgagtgagattcttaatcctgagttctagcttgattgcactgttgtctgagagatagtttgttataatctctgttcttttacatttgctgaggagagctttacttccaagtatgtggtcaattttggaataggtgtggtgtggtgctgaaaaaaatgtatattctgttgatttggggtggagagttctgtagatgtctattaggttggcttggtgcagagctgagttcaattcctgggtatccttgttgactttctgtctcgttgatctgtctaatgttgacaatggggtgttaaagtctcccattattaaagtgtgggagtctaagtctctttgtaggtcactcaggacttgctttatgaatctgggtgctcctgtattgggtacatatatatttaggatagttagctcttcttgttgaattgatccctttaccattatgtaatggccttctttgtctcttttgattttgttggtttaaagtctgatttatcagagactaggattgcaacccctgccttttttttgttttccatttgcttggtagatctttctccatccttttattttgagcctatgtgtgtctctacacgtgagatgggtttcctgaatacagcacactgatgggtcttgactctttatccaatttgccagtctgtgtcttttaattggagcatttagtccatttacatttacagttaatattgttatgtgtgaatttgatcctgtcattatgatgttagctggtgattttgcttgttagttgatgcagtttcttcctattctcgatggtctttaaattttggcatgattttgcagcagctggtaccggttgttcctttccatgtttagcacttccttcaggagctcttttagggcaggcctggtggtgacaaaatctctcagcatttgcttgtctgtaaaggattttatttctccttcacttatgaagcttagtttggctggatatgaaattctgggttgaaaattcttttctttaagaatgttgactattggcccccactctcttctggcttgtagggtttctgccgagagatcagctgttagtctgatgggcttccctttgagggtaacccgacctttctctctggctgcccttaacattttttccttcattgttcaacttcggtgaatctgacaattatgtgtcttggagttgctcttctcaaggagtaactttgtggcgttctctgtatttcctgaatctgaacgttggcctgccttgctagattggggaagttctcctggataacatcctgcagagtgttttccaacttggttccattctccccatcactttcaggtacaccaatccgacgtagatttggtcttttcacatagtcccatatttcttggaggctttgctcatttctttttattcttttttctctaaacttcccttctcacttcatttcattcatttcatcttccatcgctgataccctttcttccagttgatcgcatcggctcctgaggcttctgcattcttcacgtagttctcgagccttggttttcagctccatcagctcctttaagcacttctctgtattggttattctacttatacattcttctaaatttctttcaaagttttcaacttctttgcctttggtttgaatgtcctcccgtagctcagagtaatttgatagtctgaagccttcttctctcagctcgtcaaagtcattctccatccagctttgttccattgctggtgaggaactgcattcctttggaggaggagaggcgctctgcattttagagtttccagtttttctgttctgttttttccccatctttgtggttttatctactttttgtctttgatgatggtgatgtacagatgggtttttggtgtggatgtcctttctgtttgttagttttccttctaacagacaggaccctcagctgcaggtctgttggaataccctgccgtgtgagatgtcagtgtgcccctgctggggggtgcctcccagttaggctgctcgggggtcaggggtcagggacccacttgaggaggcagtctgcccattctcagatctccagctgtgtgctgggagaaccacagctctcttcaaagctgtcagacagggacatttaagtctgcagaggttactgctgactttttgtctgtgccctgcccccagaggtggagcctacagaggcaggcaggcctccttgagctgtggtgggctccacccagttcgagcttcgcggctgctttgtttacctaagcaagcctgggcaatggcgggcgcccctcccccagcctcgctgccgccttgcagtttgatctcagactgctgtgctagcaatcagcgagactccgtgggcgtaggaccctccgagccaggtgcaggatataatctcatggtgtgctgcagtccgaaaagcgcaatattcgggtgggagtgacctgattttccaggtgcgtccgtcacccctttctttgactcagaaagggaactccctgaccccttgcacttcccaagtgaggcaatgcctcgccctgcttcagctggcgcacggtgtgcacacccactgacctgcgcccactgtctggcactccctagtgagatgaacctggtacctcagatggaaatgcagaaatcacccgtcttctgcgtcgctcacgctgggagctgtagaccagagctgttcctattcggccatcttggctcctcccctcttatgcctgtctttactgcaatctccgaacataaattgtgaagatttcatggacatttatcagttcccaaataatactcttataatttcttatgcctgtctttaatctcttaactctgttatctttgtaagcagagaatgtacgtcacctcaggaccactattgtacaaactgattgtaaaacgtgtgtttgaacaatatgaaatgagtgcaccttgaaaagaacagaataacagcgattttaaggaacaagggaagacaaccataagatctgactgcctgcaggattgggcagaatagagccatatttttcttcttgcagagagcctataaatggacgtgcaagtaggagagatattgctaaattcttctcctagcaaggaatattaaatattaagaccctagcaaaataattgcattcctgggtggaggtctataaattgccgctctgggagcatctgtcttatgcagttgagataaggactgaaatacgccctggtctcctgtagtactacctcaggcttactaggattgggaaattccagcctggtaaattttggtcagaccagttctctgctctcaaaccctgttttctgttaaggtgtttatcaaaacaatatgtgcacagctgaacatagaccctcatcagtaattctaattttgcctttgccttgtgatctttgctttgccctttgccttgtgatctttattggcctcagaaacatgtgatctttgtgacctactccctgttcgtacatcccctccccttttgaaatccttaataaaaacttgctggttttgcagctcaggtggacatcacggacctgccaatatgtgatgtcaccctcggaggcccagctgtaaaattcctctctttgtactctttctctttatttctcagactggccaacacttagggaaaatagaaagaacctgcattgaaatattgggggcatgttcccccaataaaagattttatgacaaaaatgccaaaagcaattgcaacaaaagaaaaaattgacaaaagggaggcaattaaactaaagagcttctgcacagcaagataaactatcatcagagtgaacagacaacctacagaatgggagaaaaattttccagtctatccatctgaaaaaggtctaatatccagagtctacaaggaacttaaacaaatttacaagaaaaaaacaaccaaccccatcaaaaagtgggcaaaggacatgaacagacacttctcaaaagaagacattcatgccgccaaaaacatatgaaaaaaagctcaacatcactgatcattagagaaatgtaaatcaaaaccacaattaagatatcatctcacaccagtcagaatggcaattactaaaaagtcaagaaacaacagatgctggcgaggttgcagagaaaaaggagcgcttttacattgttagtgggagtgtaaattagttcaactactgtggaagacagtatggcgattcctcagagatctagaagcagaaataccatctttactatttttaagtgtacaattcagtggtaacatttatattcttttgttttctcttcatcccctgccttccacctaccattcctggcctctggtaaccactattctactatcgtcatgaaaaacactattattagcttccacatatgagtgagaacatgcaacatttgtctttctttgcttggctaatttcacctaacataatgacccccagttccatcatgttgctgcaaatgacagaatttcgttcttctatatggctgaataatattccatcactgtagatttacaatacatattcatgcctcattctggaaatttccgtcattactctctttcctcccaaatgtttttgactgctctcacatgttttctcttccaggttgactatagaattatttttgctgattgagtttttctaccattgggattttaagcagaactgggttaaatttatagattgatttcagaagaattgacagccttacaatattagatctttccatatagaggcatacaatcatctatccatttattcaagtgttatttctagagaagagtgtcataggcttttaaaaattagagtttctgcctttttaataagtctaattctaaatatgtagtaagttttttaactattgtgaagtgaatattttaatatgagatgaatattttagggttcttatacatattgctaaactcttcaacaggaaggtgacagtttgtctccattagaaatcactgtgtccatttcactgtaacatcacaagtactaactagttttattcattgctaatttgagaggcaaaagtataactttactttgccttttctgcttatgagtgaagccattatctcttatctgttaaatatgttttcatttgtctgtttgtaaattgcctttatgttcttggcttatgtattcaccagtatctcagtgttttcatatgcatttcttagatctttacatggtaaaaatattaaccttttcatattttctgcaaatatttctccaagtctgttttttgccttttaacttggttaacttttccataaattttaaaaaatgtttatgcagtcaaatctgttgatatttctttgtgccttcttccttttcttgtatgcctggaatattaatctagcctttcttttgatacattttataaatatatgtatccaagagggatttttccaatgaataatcaattacctcaacactatgtattgagtatttcactccctgccccacccctactgatttgtggtatttaatttatgcatatattaaattattttaagtttaaaaatgtgtttctgatctgcatcttccattccatcaattttctattcctaaatcactatggctcaaattgttacacaataacaatcacccccacacatttccagtcatttagacaccagccagagactacactttacatacattatctcatttaactcttcgaacaaaagtcccatgaggcaaatgttagaattttcattttatagatgaagaaagccccaggaagaaaaagtctgacagagaacacattccagctttgtcttcattctttttcccagtttgtttaagaatacaccacctggcttctctcaatccaatttttcttacttagtgcccatgcatacctcctaccacctcctaatttggattcagggtcagatcagccaaacaactgacaaggtgccaacacataacaagtgctaaaatgtcactgcaacatttccactctgatttactcacgcaactcctttcataactggcaaatgcaaacttacaaaccattcctgccggaacacgcagagccctccagtggaagtttcagaaactctccttgccaacgctgcctatcttcattcaacattttgtggcatgtctgtggaaataatgacaggtcatcagccctgccatcagccaagcattcactagtcatccaaatacaacaggtgatgtaggctaaaattctaaaactgaacaactcacagtacagtgcttttcagtgatgataattcattttttccctattgtctaaattttaaacattttaatctgtaccttgaaaagttatctggtttaaaaaatcacaaaagaaaactgaagacaggataaatggaaagtgttttgctgatgtgaatgccaggaaaacaataattttcatacatattttgacaaaattttagaactatatttatataaactttatgtgtaagaagtgtaactaatgatagatacaaatagtggaaaaaacattaaataaaagaatttcaaataaacttagatgttatgttcagtgtaactactaaatccattaatggtagccaaccaagagagatgtgcaattattaattgaaaatctacttcatgctctacaataaatatttgaataaatgtataaagaatatcaatttgaagatgtatccaaatcttacactgtctgggttgccagacaccatactttagctgcgctcatacctgagatgtcctcttaactctttcccctctagactagacagacttctccacaaaatcaagaaattgggtatcattttttaaaaaaacttcctcagaacccagcacacatgatcaccatcaattaatgttttctgagtaaacaaacgctgcatccctcctcactcctacctaaccccaatttagctcctcttcagaaagaccagttcttccacccctttgactgtgttctccatcttatggaagataattacacagaaaacaaaagattcaccctaggtgagctatgcacatgggttccgatatctgtgtctaatttcatacctctttctgcttccaaacccaaaatggacattcaggtcccaggaagcaaggcccacacttccttatatgaaattctttttatttaaccttcattttttattttagtaaaatatgcataacataaaatgtatcatttaaccattttaagggtacagttcagtaggattaagtatattcacttttttgtgcaacctcactactatcgttctccagaacttcttcatgtgcactttttaaaattattattgtactttaagttctagggtacatgtgcacaacgtgcaggtttgttatatatgtatacatgtgccatgttggtttgctgcacccattaactcatcatttacattaggtatatctcctaatgtcatccctcccccatcccccaaccccacgagaggccccggtgtgtgatgttccccgccctgtgtccaagtgttctcattgttcatttctcacatatgagtgagaacatgtagtgcttggttttctgtccttgcgatagtttactgagaatgacggtttccagcttcatccatgtccttacaaaggacatgaactcatcattttttatggctgcatagtattccatggtgtaaatgtgccacattttcttaatccagtctatcactgatggacatttgggttggttccaagtctttggtattgtgaatagtgccacaataaacatacgtgtgcatgtgtctttatagcagcatgatttatagtccttggggtatatacccagtaatgggatggctgggtcaaatggtatttctagttctagatccttgaggaatcgccatactgtcttccacaatggttgaactagtttacagtcccaccaacagtgtaaaagtgttcctatttctccacatcctttccagcgcctgttgtttcctaactttttaatgatcgccattctaactggtgtgagatggtatctcattgtggttttgatttgcatttctctgatggccagtgatgatgaacattttttcacgtgctgttggctgcataaatgtcttcttttgaaaagtgtccattcatatgctttgcccactttttgatggggttaatttttttcttgtaactttgtttaagttctttgtagattctggacattagccctttgtcagatgggtagattgcaaaaattttctcccattctgtaggttgcctgttcactctgatggtagtttcttttgctgtgcagaagctcttcagtttaattagatcccatttgtctattttggcttttgttgccattgcttttggtgtttcagtcatgaagtccttgcccatgcctatatcttgaatgctattgcctaggttttcttctagggtttttatggttttaggcctaatatttaagtctttaatccatcttgaattaatttttgtataaagtgtaaggaagggatccagtttcagctttctacatatggctagccagttttctcagcaccatttattaaatagggaatcctttccccatttcctgtttttgtcaggtttatcaaagatcagatggttgtagacgtgtggtgttatttctgggcctctgttgtgttccattggtccatatctttgttttggtaccagtaccatgctgttttggttactgcagccgtgtagtatagtttgaagtcaggtagcatgatgcttccaggtttgttccttttgcttaggattctcttggcaatgcaggctcttttttggttccatatgaactttaaagtagttttttccaattctgtgaagaaagtcattggtagctgataggggcattgaatctgtagattaccttggacagtatggccattttcacaatattgattcttcctatccatgagcatggaatgttcttccatttgcttctgtcctcttttattttgttgagcagtggtttgtagctctccttgaagaggtccttcacaacctttgtaagttggattcctaggtatttgatcctctttgtagcagttgtgatttggagttcacttatgatttggctctctgtttgtctgttattggtgtataagaatgcttatgatttttgcacattgattttgtatcctgagactttgctgaagttgcttatcagcttaaggagattttgggctgagatgaaggggttttctaaatatataatcatgtcctctgcaaacaggaagacttttacttcctcttttcccaattgaatacactttatttctttctcctgcctgactgccctagcaaagaactttcaacactatgttcaataggagtggtgagagagggcatccatgtcttgtgccagttttcaaagggaatacttccagtttttgcccattcagaatgatactggctgtgggtttatcataaatagctcttatctcttattattttgagatacgttccatcagtacctagcttattgagtttttagcatgaaaggatgttgaattttgtcaaaggccttttctgcatctattgagaaaatcatgtggtttttgtctttgattctgtttatgtgatggattacatttattgacttgcatatgttgaaccagccttgcatcccagggatgaagccaacttgatcttggtggataagctttttgatgtgctgctggattcagtttgccagtattttattgaggatttttgcatcaatgttcatcagggatattggtctaaaattctttttttgttgtgtctctaccaggctttggaatcaggatgatgctggcctcataaaatgagttagggtggattccctctttttctattgattggaatagtttcagaaggaatggtaccagctcctctttgtacttcgggtagaattcagctgtgaatctgtctggtcctggactttttttggttggtaggctattaattattgcctcaatttcagagcctgttattggtctattcagagattcaacttcttcctggtttagtcttgggaaggtgtatgtgtccagaaatttatccatttcttctagattttgtagttcatttgtgtagaggtgtttatagtattctctgatggtggtttgtatttctgtgagatcagtggtgatatcccctttattattttttattacatctatttgattcttctctcttcttattagtcttgctagcggtctatcaattttattgatcttttcaaaaaaacagctcctggattcactgatttttttgaagggttttttgtgtctctatctccttcagttctgctctgattttagttatttcttgccttctgctagcttttgaatgtgtttgctcttgcttctctagttcttttcattgtgatgttagggtgtcaattttagatctttcctgctttctcttgtgggcacttagtgctataaatttccctttacacactgctttaaatgtgtcccagagattctggtacgttgtgtctttgttctcattggtttcaaagaacatctttatttctgccttcatttcatgatttatccagtagtcattcaggagcaggttgttcagtttccatgtacttgtgtggttttgagtgagtttcttaatcttgaattctaatttgattgcactgtggtcagagagtttgttgtgatttctgtccttttacatttgctgaggagtgctttacttccaactatgtggtcaattttggaataagtgcaatgtggtgctgagaagaatgtatattctgttgacttggggtgggagagttctgtagatgtctattaggtccatttggtgcagagctgagttcaattcctggatatccttgttaaccttctgtcttgttgatctgtctaatgttgacagtggggtgttaaagtctcccattattaaagtgtgggagtctaagtctctttgtagatctctcaggacttgctttatgaatctgggtgctcctgtattgggtgcatatatatttaggatagttagctcttcttgttgaattgatccctttaccattatgtaatggccttctttgtctcttttgatctttgttggtttaaagtctgtcttatcagagactagaattgcaacccctgcttgttttttgctttccatttgcttggtagatcttcctccatccctttattttgagcccatgtgtgtctctgcccatgagatgggtcacctgaatacagcacactgatgggtcttgactctttattcaatttgccagtctgtgtcctttaattggggcatttagctcatttacatttaaggttaatgttatgtgtgaatttgattctgtcattatgatgttagctggtgattttgcccgttaattgatgcagtttcttcctagcattgatggtctttacaatttggcatgtttctgcagtggctagtaccggtttttcctttccacgtttagtgtttccttcaggagctcttgttaggcaggcctggtggtgacaaaatctctcagcatttgcttgtctgtaaaggattttatttctccttcacttatgaagcttagtttggctagatatgaaattctgggttgaaaattcttttctttaagaatgttgaatattggcccccactctcttctggcttgtagagtttctgctgagagatccactgttagtctgatgggcttccctttgtgggtaacccgacctttctctctggctgcccttaacattttttctttcatttcaaccttggtgaatctgacaattatgtgtcttggagttgctcttctggaggagtatctttgtggtgttctctgtatttcctgaatttgaattttggactgccttgctaggttggggaagttctcctggataatatcttgaagagtgttttccagcttcgttccattttccacatcactttcaggtacaccaatcaaatgtagattttgtcttttcacatagtcccatatttcttgaaggctttgttcgtttctttttactcttttttctctaaacttctcttcttgctttatttcattaatttgatcttcaatcactaatactctttcttccacttgatcaaatcggctactgaagcttgtgcatgcgtcacgtagttcttgtgtcacggttttcagctccatcaggtcatttaaagtcttctctacactgtttattctagttagccatttgtctaatcttttttcaaggtttttagcttccttgcaatgggttcaaacaccctcctttagctcagagaagtttgttattaccgactttctgaagcctacttctgtcaactcgtcaaagtcattctctgtccagctttgttctgttgctggcgaggagctgcaatcctttggaggagaagaggagctctggtttttagaattttcagcttttctcctctggtttctccccatctttgtggttttatctacctctggtctttgatgatggtgacctacagatggggttttggtgtggatgtcctttttgttgatgttgatgctattcctttctgttgttagttttccttctgtcaggtccctcagctgcaggtctgttagagtttgccggaagtccactccagaccgtttgcctgggtgtcaccagtggaggctgcagaagggcaaatattgcagaacagcaaatattgctgcccgatccttcctctggaagcttcgtctcagagggccacctggctgtatgaggtgtcagtcagccctactgggaggtgtctccaagttaggctacctgggggtcagggacccacttgacgaggcagtctgtccattctcagagctcaaacaccatgatgggagaaccactgctctcttcagagctgtcagacagggacgtttaagtctgcagaagtttctgctgccttttgttcagctatgccctgcccccagaggtggagtgcacagaggcaggcgggcctcgttggcttcctggccgctgtgtttacctactctagcctcagcaatggtggacgcccctcctccagccaggcttgccgccttgcagttcgatcttggactgctgcgctagcagtgagcaaggctccgtgggcatgggactcactgagccaggcacgggatataatctcctggtgtgccatttgctaagacctctggaaaagtgcagtatctaggttgcagtgtcccgattttcccggtacagtctgtcatggcttcccttgtctaggaaagggaaatcccctgaccccttgcacttcccaggtgaggcgatgccctgccctgcttcggctcaccctctgtgggctgctcccactgtccaaccagttccaatgagatgaaccaggtacctcagttggaaaagcagaaatcacccatcttctgtgtcgatcatgctggaagctgtagaccagagctgttcctattcagccatcttgaaatgaacctacttatatgaaattctaatgcaaacacaataagaaattgactcactggccaacataaactcagtatgccccatccaatatctcattttggagaatgctgagattttaatgtgctgcgtcttgctttcacttactgccatgcatccattttagaaaacagaaagaaactagaaaccatgacttctttccacctttaaaaagcatttcatgaagaaaactaagccacaaattcagtaattcagtagttctgggtgggaagtggggaaaagaacaagtttggagggagtacacccaggagttgtcagcactgtattgaacaggagtgttcattcaatgaaagcttgcttagtgtcatatcaacctactcccatttttaacagtagtctagttttcatccagcctccacccctccctgacgtagcccacatgctttggcagaagataactccatctcccccaccccctttgcctcattatttgttcaagtaacctagattcatgccaaccaacacttgaaatgctgtcccatcaccatggacaacctatgtcatcaaagaagcagaaggaggggtctgtgattctactttgtctaggaagtttttctcattctaatccatggcttgcaatacatcttagtgtcattcaccttgttttgatttttccactcagtgatatacaggagtgctgtagtgccacatcagtgcatatgcagtgggatattcggctctgtggcattgccccttctttaggtggcatgttacaaaaatgagccaaagatgatgtctgtgtattgactcttaggtggtttatttcttcactgctggctgagacttgtgagctaaaaagcctgcttccaccaaattcaaatttttacacatctaattatttttaaataaaaataccctgaagaagaagattttcagcaatttagaccttcctgctttgcgtgtcctgtaaatattcaccctgcatctgccaaccacaaacaagatagccttgtggttgtaagactccaggccactactgtaccttggagactctgacccagagattccccaccatacagctagacaatatcatctagacacaaaagtccctctccgattcccttctcttctgggagttctcttgccctcctccaggaaagggatttctttgcctgcaaacctgaccacttcccttaataaagtttgtaggcactactgccacttatagtcatatccttttccttgaccattccccaaatccctcaaaccacctacataaccacactccaatatcactttgaggaactatgccttcaaatctccttcagtttatgagctttgggtggggctgcacaccaagatctggtcaagcagtataccaaatcctccagttatagctttagggaagggcatctgacccaagttgatccaaccaaagtgaatcctaggcctcatgctgagccaactggagggaatgttccctgtctcccaaaagcctgtaatgggaagagcagtagcagctaccttgcctatcaagtctggaggatcaaacaaagtctctaggactcacttttgctccatctcttagaactgcttttctctgtgttggcctcatcctcaagtgggctaaagagatagaggaaaccaagaagaataaaatgattgttttttaaaaggcaagcaggggaagataagatccagaagacaggtggagaggtggatctgatgaagaaaggaaggaaggtaccacgatgctgatgtaggtaggacaataaattcagaggaaagatgtcggtacaggcaaattattagaggatttatctctcagggagctaagaggaacaaatacaagagaaaagacattcatctactaatagaggtcaaccaagtaaataatccggacacatctattggtccacaagcctcaccctttcagagaacttccaatcatgtttttaggacctttttcttaaataatgaagacagccaaaatcatcagagagagtacaagaccaaaaacaagagaaaaaaaggaaagagagagagagagagagatagagacagagagagagaccaaaataagaaacgaaacaacacagagggcagaagaacaacaaaattataataagcagccttagaaagtgaaataaaataagaagagcccataaaaagaaacaatatcacaaaaacagttcttgaaaatgaaaaacgtgatcacagaaattcattaaaatcaacagaagtcttgtagtttaagttgagaaagtctcccagaaagtagagagaaaagaaaaattgatggataataggagataaatgaatttttaaaaaggccccaaagttttaacatctgaagaataaaaattctctagaaaaagaacaaagaaaatggggatgagggagcaccagagtaatattttttaaaatttttccaaaaattgaataaagtacccacattcaaaacaaaatggattaaaactaaattcaccccaagacaatcactgtgaaatttcagatcactaagatctgacagaagagtctacaagcttccaaagtggggatgggggagaaggggcgtgtcagttttcacatgcaaaggatgaatgaaaggatttctgcttcttctaacagcaggctaggtgttttgtactaaaccttcctctggggacaattataaaagctagacaaaatattttaaaatatatttttgaaggcaccacagagctaataaaaaaaattgccaggacaggacatttcacttaacataatgtcctccatgtgcatccatgttgtcacaaatgacaggacttcttactttttaaggctgaatagcattctgtgtggtatatatactatattttctttttaatttttatgggtacatggtaggtgtacatatttataagtacatgagatattttgatataggcaggcaatgtgtgcaaattacatcctgaaaaatgggaagggcatctgacccaagttgatccaaccagagtgaatcctaggcctcatgctgagccaactggagggaatgttccctgttttccaagagcctgtaatgggaacagcagtagcagccaccttgcctatcagcctatcagccgccttgccatcccctccagcatttgtcctttgtgtcacaaacaatccaattatagcaattatactatttcagttatttcaaaatgtacaaaccattattaattatagttactctgctgtgctatcaaatactagttcttattcactctttccatggtttttttttttgtacccattatccatccgcacctctccatctcagcccccaactgtccttcccagcctctgctcttctactcactatggttatgaggtcaattgttttgatttttagatcccacaaataagtgagaacacatgatgtttgacttcctgtgcctggcttattcactcaatataaggacctccagttccatccatgtttttgcaaatgactgactctcattttttatggctgaatagtactccattgtgtatatgcaccacattttctttatccatttgtctgttgatggacacttaggttgcctcccaaagcttggctattgtgcacagtgctgcaacgaacatgggagagcagatctctctttgatatattgattttctttcattttgatatatacgtagcagcgagactgctggatcataggatagctctatttctactttattgaggaacctccaagctgttctccatagtggctgtactaatttacatttctaccaatggtgtataagggttcccttttctccacaactcaatgatgttgagtaccttttcatatgtctgtttgccatttgtatgtcttctttttttttttatcattattatactttaagttttagggtacatgtgcacaatatgcaggttagttacatatgtatacatgtgccattctggtgcgctgcacccactaactcatcttctagcattaggtatatctcccaatgctatccctcccctctcccccggccccacaacagtccccagagtgtgatgttccccttcctgtgtccatgtgttctcatagttcaattcccacctatgagtgagaacatgcggtgtttggttttttgttcttgcaatagtttactgagaatgatggtttccaatttcatccatgtccctacaaaggacatgaactcatcattttttaaggctgcatagtattccatggtgtatatctgccacattttcttaatccagtctatcattgttggacatttgggttggttccaagtccttgctattgtgaataatgccgcaataaacatacgtgtgcatgtgtctttatagaagcatgatttatagtcctttgggtatatacccagtaatgggatggctgggtcaaatactatgtctagttctagatccctgaggaatcgtcacactgacttccacaatggttgaactagattacagtcccaccaacagtgtaaaagtgttcctatttctccacatcctctccagcacctattgcttcctgactttttaatgattgccattctaactggtgtgaaatggtatctcattgtggttttgatttgcatttctctgatggccagtgatggtgagcattttttcatgtgttttttggctgcataaatgtcttcttttgagaagtgtctgttcacgtcctttgcccactttttgatggggttgtttgtttttttcttgtaaatttgtttgagttcattgtagattctggatattagcccgttgtcagatgagtaggttgtgaaaattttctcccattttgtaggttgcctgttcactctgatggtagtttcttttgctgtgcagaagctctttagtttaattagatcccatttatccattttggcttttgttgccattgcttttggtgttttagacatgaagtccttgcccatgcctatgtcctgaatggtaatgcctaggttttcttctagggttttcatggttttagatctaacgaagcctcaggagccgatgcgatcaactggaagaaagggtatcagtgatggaagatgaaatgaatgaaatgaagcgagaagggaagtttagagaaaaaagaataaaaagaaacgagcaaagcctccaagaaatatgggactatgtgaaaagacaaaatctacatctcactgatgtacctgaaagtgacggggagaatggaaccaagttggaaaacactctgcaggatattatccaggagaacttccccaatctagcaaggcaggccaacattcagattcaggaaatacagacaacaccacaaagatactcctcgagaagagcaactccaaaatacataattgtcagattcaccaaagttgaaatgaaggaaaaaaatgttaagggcagccagagagaaaggtcgggttacccacaaagggaagcccatcagattaacagcagatctctcggcagaaactctaccagccagaagagagtgggggccaatattcaacattcttaaggaaaagaattttcaacccagaatttcatatccagccaaactaagcttcataagtgaaggagaaataaaatactttacagacaagcaaatgctgagagattttgtcgccaccaggcctgcactaaaagagttcctgaaggaagtgctaaacatggaaaggaacaaccggtaccagctgctgcaaaatcatgccaaaatgtaaagaccattgagactaggaagaaaccgcatcaactaacgtgcaaaatcaccagctaacatcataatgacaagatcaaattcacacataacaatattaactttaaatgtaaatggactaaatgctccaattaaaagacacagactggcaaattggataaagagtcaagacccatcggtgtgctgtattcaggaaacccatctcacgggcagagacacacatagactcaaaataaaaggatggaggaagatgtaccaagcaaatggaaaacaaaaaaaggcaggggttgcaatcctagtctctgataaaacagactttaaaccaacaaagatcaaaagagacaaagaaggccattacataatggtaaagggatcaattcaacaagaagagctaactatcctaaatatatatgcacccaatacaggagcacccaaattcatacagcaagtcctgagtgatctacaaagagacttagactcccacacattaataataggagactttaacaccccactgtcaacatcagacagatcaacgagacagaaagtcaacaaggatacccaggaattgaactcagctctgcaccaagcagacctaatagacatctacagaactctccaccccaaatcaacagaatatacatttttttcagcaccacaccacacctattccaaaattgaccacatacttggaagtaaagcactcctcagcaaatgtaaaagaacagaaattataacaaactatctctcagaccacagtgcaatcaaactagaactcatgattaagaatctcactcaaaaccactcaaccatatggaaactgaacaacctgctcctgaatgactactgggtacataatgaaatgaaggcagaaataaagatgttctttgaaaccaacgagaacaaagacacaacataccagaatctctgggacacattcaaagcagtgtgtagagggaaatttatagcactaaatgcccacaagagaaagcaggaaagatccaaaattgacaccctaacatcacaattaaaagaactagaaaagcaagagcaaacactttcaaaagctagcagaaggcaagaaataactaaaatcagagcagaactgaaggaaatagagacacaaaaaacccttcaaaaaattaacgaatccaggagcaggttttttgaaaggatcaacaaaattgatagcctgctagcaagactaataaagaaaaaaagagataagaatcaaatagatgcaataaaaaatgataaaggggatatcaccaccaatcccacagaaatacaaactaccatcagagaatactacaaacacctctacgcaaataaactagaaaatctagaagaaatggataaattcctcgacacatacactctcccaagactaaaccaggaagaagttgaatctctgaatagaccaataacgggagctgaaattgtggcaataatcaatagcttaccaaccaaaaagagtccaggaccagatggattcacagccgaattctaccagaggtacaaggaggaacaggtaccattccttctgaaactattccaatcaatagaaaaagagggaatcctccctaactcattttatgaggccagcatcatcctgataccaaagccgggcagagacacaaccaaaagagagaattttagaccaatatccttgatgaacattgatgcaaaaatcctcaataaaatactggcaaaccgaatccagcagcacatcaaaaagcttatccaccatgatcaagtgggcttcatccctgggatgcaaggctggttcaatatatgcaaatcaataaatgtaatccagcatataaacagaaccaaagacaaaaaccacatgattatctcaatagatgcagaaaaggcctttgacaaaattcaacaacctttcatgctaaaaactctcaataaattaggtattggtgggacgtatttcaaaataataagagctatctatgacaaacccacagccaatatcatactgaatgggcaaaagctggaagcattccctttgaaaactggcacaagacagggatgccctctctcaccactcctattcaacagtgttggaagttctggccagggcaattaggcaggagaaggaaataaagggtattcaattaggaaaagaggaagtcaaattgtccctgtttgcagacaacatcattgtatatctagaaaaccccattgtgtcagcccaaaatctccttaagctgataagcaacttcagcaaagtctcaggatacaaaatcaatgtacaaaaatcacaagcattcttatacaccaacaacagacaaacagagagccaaatcatgagtgaactcccattcacaattgcttcaaagagaataaaatacctaggaatccaacttacaagggatgtgaaggacctcttcaaggagaactacaaaccactgctcaaggaaataaaagaggatacaaacaaatggaagaacattccatgctcatgggtaggaagaatcaatatcgtgaaaatggccatactgcccaaggtaatttatagattcaatgccatccccatcaagctaccaatgactttcttcacagaattggaaaaaactactttaaagttcatatggaaccaaaaaagagcccgcatcaccaagtcaatcctaagccaaaagaacaaagctggaggcatcacactacctgacttccaactatactgcaaggctacagtaaccaagacagcatggtactggtaccaaaacagagatatagatcaatggaacagaacagagccctcagaaataacaccgcatatctacaactatctgatctttgacaaacctgagaaaaccaagcaatggggaaaggattccctacttaataaatggtgctgggaaaactggctagccatatgtagaaagctgaaactggatcccttccttacaccttatacaaaaatcaattcaagatggattgtatgtcttcttgtgagaaatatctattctaatcttttgcccattttttaatcaggattagatttttttcctatagagttgctgagctcctcatatattctggttattaatcctttgccagatgggtagtttgcaaatattttctcccattctgtgggctgtctcttcactttgttgattgcttcctctgctgtgtagaagctttttaacttgatgtgatctcatttgtccatttttgctttggttgcctctgcttgtggaatattacttaaaacatttttgcacagaccaatgtcctgaagagttaccccaatgttttgttttagtagtttcatagtttgaggtcttcgatttaagtctttaatccattttgatttgatttttatttatgatgagagacaggggtctagttttattcttctgactatggatatccagttttcccaacaccatttgttaaagagactgtcttttccccagtgtatatcttgcatctttgtcaaaaatgagttcactgtaggagtgtttgtttctgagttctctattatgttccattggtttatatgtctgtttctatgccagtaccatgctgttttggttactatagctctgtagtataatttgaagtaaggtaacataattcttccagttttgttctttttgcttcaggatagctttggctaatctgggtcttttgtgatttcatataaattttaggatttttttctatttctgtgaagaatgtcattggtattttgataaggattgcattgaatctgtaggtcactttgggtagtatgggcattttaccaatatcgatttttccaatccataaacatgcaatatctttccatttctggtgtcctgttcaatttcttttatcagtgttttacagtttttcattgtagagatctttttcttgggttaattcctaggtatttttatttgtggctactgtataggggattacattttttatttccttttcagattgttcactgttagcatatagatatgctactttttttatgttgatgctgtatcctgcaactttactgaatttgcttataagttctttttttttttttgaagggtatatctaggttaattttaataagtgttgccaggttgctttccaaaaatgccataacaatttatgtttcagcaacagtgaattagagaatgctttccctgaatctttgcccaatagttctaattggtagagtctttaggttttcccaaatacaaaatcatatcaacaggggtaatctgacttcttcttttccaatttggatgtccttttatatgtttctcttgtctaactgttctagctaggacttccagtactatgttgaataacaatagtgaaagtggacattctcgctgtattctggatcttagaggaaaggctttcagtttttcctaattcagtatgatactattcatagctgtggatctgtcatatacatggctttcattatgttgaggtattctccttctatatccaggtttttgagggtttttatcataaagggatgttggattttatcaaatgatttttcagcatcaattgaactgttcatatggcattctgttgatatgatgcatcacattgatttttaaattttattattttaaatttcttgtgggtacatgataggtatatatttatagggtacatgagttgttttgatacaggcgtgcaaagtgaaataagcacatcatggaaaatagggtgtccatcacctcaagcacttatgtttcaagttacaaacaatccaattatattgttattttaaaatataccattaagttattattgactatagtcaccccactgtgctatcaaatagtggttcttattcatccatttttttttgtacccattaaccattcccagctccatggttatcagatgctgggaagggtatcacattgatttatttgcacattttgcaccatctttgcatccctgggataaatctcacttagttatgatgagtaatttttttaaatgtattgttaaatttgattggctagcattttgttgaagatttctgcaccagtattcatcagagatactggcctgtagttgttgttgttgtttttaatgtgtctgtgtctgtttttggtatcagagtaatactggcctcaaagaatgtttgtaacatttcctcctcctctattttttggaacagtttgaataggatttgtattagtttttaaatatttgctagaattcagcagtgaagccattgcgtcctgtgcttttcttttcctcttttttgagaaaggttttgctctgtcacccagtgtgcagtgcagtggtataatcatggtacactgtagcctcaacctaaagaaaagtaaaggtttttatttataggagaccttttattatgactttcatctcattattattattggtctatttgtattttggatttctttatggtttgatcttggtaggttgtatgtgtctagatttttgaatttattggcatatggttgctaatagtagtcactaatgatccttcaaagttccgtggtatcagtagcaatgagtctttcttcatctccgattttatttatttggtcttctctctttttttcttagtctggctaaaggtttggccatattgtttatcttttcacaaaaccaatgttttatttcactgatcttttatattattttcttcatttcaaattctcttatttctgcgatgatctttattacctcccttcttttactaattttggggtaggtttgctcttgcttttcttgttctttaagatgcatcattaggctatttatttgaagtttttcttctgttttgaggtaggcatttatacctataaatttccctcttagtattgcttttgctctatcccataggttttggtatgttgtgtttgcattatcatttgtttcaataaatttttattccttctcaatgttgttattggcccactggtcattcaggagtgtactgtgtaatgtctaatgtgttcatatagttccaaaattattcttattatagttccatatagttcacatagtttccaaaattcttcttattattgatttctacttttattccattgtggtcagagaagatgcttgatattatttcaattttttgaatgttttatcatttgttttgtgacctaatatatggactatcattgagaatgatccatgtgctgaggaaaagaatgtgtattctgcagcctttggatgaaatgttctgtaaatatctattaggtctatttgttccatggtgaagattaagtcctatcattttttgttgattgtctgtctggaagatctgtccagcactgaaagtggggtattgaagtctcccactattatcatgttggcatttctctctctctctctctctctctctctctctctttagctctaataatgtttgctttatatatctgggtactacagtgctgcgtacatatatatttgcaatcattatatcctgttgctgaattgacccctttaccattatataatgcccttctttttctcttgcagtttttgtctggacatctattttgtctaatgtaagtatagctacttctgctcttttttggttttcattggcatggaatctttttccatctattattttcagtctgtgtgcatatttataggtgaagtgtgtttactgtaagcaagagatcactgggtctcatgtattcatccactcagccactctgtcttttggttggagagtttagttcatttatattcaaagttattattaagtagggacttactcctgcctttttgttatttgttttctggttgctttatggtcttttcttccctccttccttctttccttccttcctgtcttttgtttttagtcaagattatttgctctggtgatatcatttaatctcttggtttttgttttttatatatcccttgtatgttttttgatttgagattaccatgaggctagcaaatactgtctcataacccattattttaaactgatgacagcttaacactgagtgcataaacaatcaaacaaacacacaaaaagaaataactaataaaaattctacacctaaacttcatcccccactttgtaattttttgttgtttctctttatgtcttattgcactgtgtttaaaaggttgttttagttattattttttattggttcatcatttagtctttctatttgagtagtttacacaccacagttatagtgttttaagattctgtttttccatgcacttactattaccagtcagttttgtaccttcagataatttttccttgctcattaacatccttttctttcagagggaagacttccatttagcatttcttgtaggacaggtctgatgttgatgaaatttctcatcttttgcttgtctgagaagatctttattttccttcatgcttgaaggatattttagcaaccatatgcaaataaattcaaaaatctagacacatacaacctaccaagatcaaaccatgaagaaatccaaaacacaaacagaccaataataataatgagataactttgaggattagacactattttccaccataaatactctaacaattgtagtaattagtagcagacaaacctagcatccagatcaccaatcaatagcctttgggaggcaaatattgaaactgaaaaattctttgtcccacttaacagacaaagactctatgatgacaagatgcaagataaatacgctcttaagtttatagtaactatatataagcattctccaactgtctcatctttctaaacaataaaaaacatggctaagtactgagtttaaaacttctcatgtcaataatttttttcactagaagtttctcattaagtactattgaaacttaagggccatgatttcaagtgtaattttaactaagcctgaatcaaagaactggaagcttatcagtttatttccacaataccaaagtgaaaattaatccctatttgaacatcttcccttctccccttgctacaacagctcaagagtgcaactgtttcaccacatcttgtttacagtcatgtatataacacactagttcccaaacttagttgtacattcttgcctgtttgcataggtggtactaatacagctagtccatgaagcagcatttgggaaccatggggcttcatcacatcctcagtagcctgaaaacacttatctagggataaggtgagagctgatttctcaaaggtcccagaatctcatgagtgtcgtctggggctctatcacctaatccttggtgcaagaatcagagactttcagtttcctgtaaaggcaaagtacataatgcagaccaaccctccccatgaaaataaaaagccagatgaaatattaagaacatcttagaacatcaaaggataagctgcacacaaagagacatataatgtataattccatttttgtgaggtgtctagaatagtcaaactcaaagagacaaggtagaatggtggttgccagaggctgggaggagaggagaaggagagtttttgtttaatgggtacagagtttcaattggggaggatgaaaaagaggtccagagatagatgctggtgatggctgcagaacattgtgaatgtatcagtgccagtgaactgtacacttaaaaatggttaaaatggtgtatataatttttaattttttttatagagagacagggtcttgctatgatgcccaggttggtctcaaactcctggcctgaagcaatcctcctgccttggccttccagaagtgctgggattaaagatgtgagctgccactgctgggaaaaatggtgtattttatgttatgtatgttttaccacaaaaacaattttttgataaaagcatcagaaacctaataggctagtgaggccttgcctggcagagatcagagtgggggtcaggttcagagaggccacttaataactgaagcctctggacttggagccaatttttcctagaagcattttctgatccagacgaggtctcgaagaggctgagctgtactactggcaggctcattggcctaggaggacatcagtggaactccatcactctgggctgaattatatcatataaccactaaaaaaattaaattagcaatttaaaattttctcacaaagaaaatcccagacctagaaggtttcaatggtgaatctgattaaagaattaagaaataaatcatggttttcttgtgtcttgatttcccctcagttcagttctgatttttgttatttctcatcttctgctagctttggggttgatttgttcttgcttctttaatctttgacttgtgaagttatgttgttaatttgatatctttttaactttttgatgtgggcatttagtgctatgaatttccctcttaacattgctttagctgtgtcccagaaattctgctatgttgtatctttgttctcattagtttcaaagacagttcttgaattctgccttaattttattatttattcaaaagtcattcaggagcatgttgtttaatttccatgtaattgcatggttttgagtgattttaataatcttgacttctatttttattgtgctgtggtctgagagtatgtttggtatggttttggttctattacatttgttgaggattattttatgtctaattatgtggttaattttcgagtatgtgccatgtggcaacaagaagaatgtatattctattgttttggggtgcagagttttgtatagaagtctatcagttctatttgttccagtgttgagtttaggtcctaaatatcattgttaattttctgccttgatgatctgtctaatactgtcagtggagtgttgaagagtccccttattattgttcaagagtctatgtctccttgtaggtctttaaaacttgctttataaatctgggtactcctgtgttgtgtgcatatatatttaggatattcagatcttcttgttgaattgaaccctttaccattgtgtagtgtccttctttgtcttttttgatatttgttggttttaaatctgttttgtctgaaattaggattgcaacccctgcttccttttttctatttgctgggtagattttcctccatccttttatttcaaacctatgagtgttgttttgtgtgagatgggtctcatgaaggcagaatactactggatcttgctttatccagcttgccactctgtgcctttgaagtggggcatttagcccattcaccttcaaggtcagtattgatatgtatggatttgatcctgtcattgtgctgttagctggttattatcttggcttctttgtgtggttgttttacagtgacactggtctgtgtgtttaagtatgtttttgtattagctggcagtagtctttcctttctatatttagtgctcatttcaagatctcttgtaaggcagatctggtggtgatgaattccctcaatatttgcttatctgaaaaggaacatatttctccctcacttaggaaacttagtttggctggatatgaaattcttggttgaagattatttttctctaagaatgttgattataggtccccaatctcttctggcttgtagggttttagctgagaggtctgctgttagcctaatggggttccctttgtaggtaaccttccctttctctctagtttgctgagaatgatggtttccagcttcatccatgtccctacaaaggacatgaactcatccttttttatggctgcatagtattccatggtgtgtatgtgccacattttcttaatccagtctatcattgttggacatttgggttggttcaaagtctttgctattgtgagtagtgccgcaataaacatatgtgtgcatgtgtctttatagcagcatgatttatattccttcaggtatatacccagtaatgggatggctggatcaaatggtatttctagttttagatccctgaggaattgccacactgtcttccacaatggttgaactagtttacagtcccaccaacagtgtaaaagtgttcctatttctccacatcctctccagcacctgttgtttcctgactttttaatgattgccattctaactggtgtgacatgatatctcattgtggttttaatttgcatttctctgatggccagtgatgatgaacattttttcatgtgtctgttggctgcataaatgtcttcttttgcgaagtgtctgttcatatccttcgcccactttttgatggggttgtttttttcttgtaaatttgtttgagttctttgtggattctggatattagcccattgtcagatgagtagattgcaaaaattttctcctattctgtaggttgcctgttcaccctgatggtagtttctttggctgtgcagaagctctttagtttaattagatcccagttgtcaattttggcttttgttgccattgcttttggtgttttagacatgaagtccatgcccatgcctatgtcctgaatggtattgcataggttttcttctagggtttttatggttttaggtctaacatttaaatctttaatccatcttgaattaattttcgtataaggtgtaaagaagggatccagtttcagctttctacatatggctagccagttttcccagcaccatttgttaaatagggaatcctttccccattgcttgtttttctcaggtttgtcaaagatcagatagttgtagatgtgtggtattgtttctgagggctctgttctgttccattggtctatatctctgttttggtactagtaccatgctgttttggttactgtaaccttgtagtatagtttgaagtcagatagcgtgatgcctccagctttgttcttttgggttaggattaacttggcgatctgggctcctttttggctccatatgaactttaaagtagtttttcccaattctgtgaagaaagtcattggtagcttgatggggatggcattgaatctataaattaccttgggcagtatggccattttcacgatattgattcttcctacccatgagcatggaatgttcttccatttgtttgtgtcctcttttatttcgttaagcagtggtttgtagttctccttgaagaggtccttcacatcctttgtaagttggattcctaggtattttattctctttgaagcaattgtgaatgggagttcactcatgatttggctgtttgtctgttgttggtgtataagaatgcttgtgatttttgtacattgattttgtatcctgagactttgctgaagttgcttatcagcttaaggagattttgggctgacatgatggggttttctagatatacaatcatgtcatctgcaaacagggacaatttgacttcctcttttcctaactgaatgtgctttatttctttctcttacctgattgccctggccagaacttccaacactatgttgaataggagtggtgagagagggcatccctgtcttgtgccagttttcaaagagaatgcttccagatttttgcccattcagtatgatattggctgtgggtttgtcatagatagctcttattattttgagatacgtcccatcaatacctaatttattgagagtttttagcatgaaaggttgttgaattttgtcaaagaccttttctgcatctattgagataatcatgtggtttttgttttttgttctgtttatatgctggattacatttattgatttgtgtatgttgaaccagccttgcatcccagggatgaagtccagttgatcgaggtggatacgctttttgatgtgctgctggattcggtttgccagtattttattgaggatttttgcattgatgttcatcagggatattggtctaaaattctctttttttgttgtgtctctgcccggctttggtatcaggatgatgctggcctcataaaatgagttagggtggattccctctttttctattgattggaatagtttcagaaggaatggtaccagctcttccttgtacctctggtagaatttggctgtgaatccgtctagtcctggactttttttggttggtaggctataaattattgcctcaatttcagagcctgttattggtctattcagagattcaacttcttcctggtttagtcttgggagggtgtatgtgttgaggaatttatccatttcttctagattttctagtttatttgcgtagagatgtttatagtattctctgacagtagtttgtatttctgtgggattggtggtgatatcccctttagcattttttatggcatctatttgattattctctcttttcttctttattagtcttgctagcagtctatcaattttgttcatcttttcaaaaaaaccagctcctggattcactgatgttttgaagggttttttgtgtctctatctccttctgttctgctctgatcttagttatttcttgccttctgctagcttttgaatgtgtttgctcttgcttctctagttcttttcattgtgatgttagggtgtcaattttagatctttccagctttctcttgtgggcatttagtgctataaatttccctctacacactgctttaaatgtgtaccacagattctggtacgttgtgtctttgttctcgttggtttcaaagaacatctttatttctgccttcatttccttatgtacccagtagtcattcaggagcagatccaaccccacatttcccctcagcactccactagcagaggttatccgtgatggctgagcccctgcagcagacttctacctggacatccagatgtttccatacatcctctgaaatctaggcagaggttcccaaacctcaactcttgtcttctgtgcacccacaggcccaacactatggagaagctgccaaggcttgggtttgcactctctgaaacaatggcctgagctgtaccttggccccttttagccacagctggagctgcagcagctgggatgcagggtgccatgtcccaaggctgcacagagcagtgggggcctggacctggcccatgacaccatttttccctcttaggcctctgggcctgtgataggagaggctgtgaagaagatctctgaaatgcactggagacattttccccattgtcttggctccccattaaatatgcaaatttctgcagatggcttgaatttctccccagaaaatgggtttgtcttttctacctcatggtcaggctgcaaatttttcaaacttttatgctctatttctttcttcatgcatatgagtatacacttttagaaacagctaggtcgcatcttgaatgctttgctgctttgaaatttcttctgccagatactctaaatgatctgtctcaagttcaaagttccacagatttctagggcaggagcaacatgctgccagtttcttcactaaagcatagcaagagtaacctttactccagttttcaataagttcctcatcaccatatgagaccacctcagcctggacttcactgtccatatcactgtcagcatttcggtcacaatcattcgacaagtctctatgaagttctaaactgtctcacatcttcctgtcttcttctgagccctccaaactattccaacctctgcccattacccagttccaaagttgcttccacattttcagatatctttatagcaatgcccacttccctggtaccaattttctctattagttcattttcacactgctataaagaactacttgagactgggtaatttatgaagaggtttggttgactcatagttctgcaggcttagcaaaaagcatgactgggaggccttaggaaacttacaatcatgacagaaggtgaagcagaaacaagcaccttgttaacatggtggcaggagaaagagagagaaagagtgaaggaggaagtgctacacatttttaaaccatcagatctcatgagaactcactcaatatcatgagaacagcaaggggaaaatctgctcccatgatccaatcacctcccaccaggcctctcctccaattcgacatgagatttgggaggggacacaaagccaaaccatatcacaagcttttaaaaagtaacttataaatgatataaatgtatgtgtagaaaacaaaagaatttacagacaaagtgttagaatcagtaattttaaaagctaaggtcctgaaattattgtgacagaggaagcagatagcctaacatgtatattttattatgttttattgtatttttaattgacagataataattctatttatggggtataatatgttttgatacacgtatacattatggaatgatcaaatcaggctagttagcatatctcacttccaatatttatcatttctttgtgatgaaaacatttaaaattctcttttagctattttgaaacatacaatatgctattattaattatggtccatgctggtcaatggattgccagaacttattcctcctaactgaaatcttgtaccttttgaccaatgccccccatccctgtccacgtctcacccagcctctggtcaccaccattctactctctactgtagtgagttcacaatgagatatcaccttactcatgttagaatggctattatcaaaaagttaaaagatgacaagcattggcaaggatatggagaaaaaggaacccttgtatgctattggtagaaatataaaccagtacagccattttggaacagaaattaaaaaccagaattaccatatgatccagcaatctcactcctgggtatatagccaaaggaagtgaaatcaccatgtcaaagtgatgtctacactcccatgttcattgtagcattattcacagtagccaagatatggaatcaactaaagtgcccatcagtggggaaattatatgtgcattttaaatacttagcaataagcagaacatataagcactaaggtaaaaaaaaaaaagcaattaattacaggtcactgttacattattctattataattccattattacacatagagaatgctttttttaagttagcagcaacaatgagaactaagaaatggtctaatgatgaccagagcaaaccctgagctgagtaagacaatggctcctttgatcataacaaactccaaatggtgtcactacagttcaccaggccattgaatgaaagtcttataacaccttgagaagtctggaaaacaattcactctacaaaaattcatagttcccgactgtatcttaggtatgtgggggtataccagaaaataagattgatgggatcttacacaaagcatacaacagagataaacataaaactcagaagtaaattaggaaaaaataatctgatctggtgacccaggacttccaggggaaactactttttgttgttgtttgaggaaataaagaaactgaggcaaagacaaatggtctcatgagtggatgtgtgtcagaagccacagcactgagtttgtcaccttttgccccttacaatcagtgctctgtttcagctgggataatggaggctatgctgaggtaacaaattaacttcataatctcagtggattaacacaacacagcttgtctctcaatcatgccatgtgctcatatggtcacagtgatctatacccacatgtcaaggacccacattgacagaggctccaccgtcttgaacttggaacccaacaccttgaggttactgcagcagggaagagagggatggaggagttgcatggggtcctagctgagtcagaccaaaagtaacacacaacacttgtattcacagcctcaacctaactgcagaggaagctgaaaaatacaacgtgtctttgccatcatttctttaattgcatgcaacagaaatcaactagcttgcttatgcaaaaaggaaaaatttttggaaatgcctggggaaggaagatcacagcatcaaagggaagactgaagagccagctttgaacacacaggactcaggaagccacagaggttcttgagaataggaagtccttgaatgtctctcctgggcaccactgctagaatgaatgatgtctagtctttcttcagtcctgtgtatgttcactcaagagtcaaaataccagggactagttagcggaaaacgtctgatggaaggattattcaaccatctcttcaagttaacatgtgcaaagggaaagcaactggattcactgtccaaacgatgatcaagtaggagtgaagtagttccccaaaaggaaataatagcagatttatacgttgaagaatggacatagagtggccactatactgatattctcattttcatattaatctgtgttgttccagctacctgccccatcctagctaatcccagaatctcagggaccctgccatgggaactgaccctttagcttgatgcaaaaatgttggggaaacagaaaatctttagttgcaattttaaaaagaaatctctcaaaggctgaaaatatttcagaaaattcagcttgtcatttatcataccacagttcctggatgccacaaaagcttggaaatcacaaagagtttttaaaaattgttacagtttcttgtgaaaagcttcactgggcaacagcaacagaaaaaacagaagtatgattaacaaccccaagaacatccgatactctctaccttacccctattatggagatttatgattttccaatttgtttcatctcagtttttcacacacacacaaatgccctaaaacattcatggcagatattcttgagtctgtgagaaaatgtaatctggtcagtgttctgggctttgtactctgtgctgtactgagggaaattccaggtgaaacagagcagccagctcagcagaaccattgtggacaatctcttctccagtaaacccctccagaggcatacagtgtttgtgctttcattgccaatggaatccctcccagccaatgttccttgtcatctcattagccagaaccaggtcatatgctggccctgagacaaattataagccagggagtgagattaccttgagactggtgtaggctaatcagcctctgcaactggtcctgaacattagtgggccacatgattcttccactatccagataattgataaggctctaggaaatatgaatgccagtcccactggctcacaaaatagagtttgggaagcaatgacctatcagggccacaccttcagacttgatctggatcttccatttacaagttctgtgacttttggcaatttacagctcagactcagttgtttttatttcaatagattttggggaagaaaaggtggtttttggttacatgaagaagttattcggtagtgatttgcgacattttggtccacccatcaccaagcagtgaacactgtacccaatgtgtaatcttttatccctcatacccctcccacccttccctcccaagtccccagagttcattatatcattcttatgcttttgcgtcctcatagcttagctcccacttatgagtgagaacatatgatgtttgattttccactcctgacttacttcacttagaataatgctctccaactccatccaggttgctgcaaacgccattatttcattcctttttatggctgagtagtattccatggtgtatatgtatatgtgtgtgtgtgtgtatatatatatatatatatatgccattttctttatccacctgttggttgatgggcacttagattggttccatatttttgcaattgtgaattgtgctgctataaacatgcatgtgcaagtatctttttcacataatgacttcttttcctctgggtagatacccagtagtgggattgctggttcaaatggcagttctacttttagctctttaaggaatctccatactgttttccatagtggttgtaccagtttacactcccaccaacagtgttcccttttcaccacatccacaccagtatctattattttttgagtttttaattatggccattctagcaggagtaagctggtatttcattgtggttttgatatgcatttccctgataattagtgatgttgagcattttttcctatgtttgctgaccatttgtatatcttttgagaattgtctattcatgcccttaacccactttttgatggaattgtttttttcttgctgatttgtttgagttccttatagattctggatattagtgctttatcagatgcatagtttgtgaagattttctcccactctgtgggttatctgtttactctgctgattatttctttcgcggtgcataagctttttagtttaattaaataccatctatttatctttgtttttattgcatttgcttttgggttcttgatcataaattctttccctaagccaatgtctagaagagtttttccaatgttatcttctggaatttttatggtttcaaatcttagacttaaatctttgatccatcttgagtagatttttgtattaagtgagagatgaggatccagtttcattcttctacgtgtagcttgccaattatgccagcaccatttgttgaatagggtgccctttccccacttttagcttttcgttgctttgtcaaagatcagttgggtgtaaatatttgagcttatttctgggttctcttttatgttccattggtctacgtgtctgtttttatatcagtaccatgttgttttggaaactatagccttgtagtatagttataagttgggtaacgtgatacttccaggtttgttctttttgcttagtcttgctttggctatgcaggctcttttttaggttccttttgaattttaggattgttttttctagttctgtgaagaataatgatggtactttggtgagcattgcaatgaatttgtagattgcttttagtggtatggtcattttcacaatattgattctacccattcatgagcatgggatatgtttccgtttctttgtgtcctctatatttctttcagcagtgttttgtagttttccttgtagagatctttcatctccttggttagctatatttctaagtatacatatattttttgtagcagttgtaaaaggggttgagttcttgatttgattctcagcttggttgctgctggtgtatagcagtgctactgatttgtggacgttgattatgtatcctgaaagtttacttaattcatttatcagatctaggagctttttggatgagtctttagggttttctagttatacaataagatcttcagtgaacagtgacagcttgacttcctctttaccaattcagatgccctttatttctttctcttgtctgattgctctggctaggactttcagtactatgttgaatagaagtggtgaaagtgggcatccttgtcttgttccagttctcagggggaaggctttcaacttttcccgttcagtataatgttggctgtgggtttgtgatagatggcttttattaccttaagccatgtcccttctatgctaattttgctgagggttttaatcataaaaggatgctggattttgtcaaatgctttttctgcatctattgagatgatcataagatttgtttttaattgtttacatggtgtattcatttattgacttatgtatgttaaaccatccttgcatccctggtatgaaacccacttgatcttcgtatattatattttcgatatgctgttggattcagttagctagtattttgttgaggatttttgcatctaagttcatctaggatattggtctgtaattttctttttttgttatgtcctttcctgattttagtattagggtaatcctggcttcacagaatgatttagggaagatttcctctttatctttttgaatggtttccgttagattggtacttttttttttttttttgaggcaagctctggctctatcacccaggctggagtgcagtggcataatctcagctcactgcaacctctgcttcacaggtccaagctatcctcccaccttagcctcccgagtagctgggactacaggcgcatgccaccacgcatggctaatttttgtattttttgtagatgatgggtttcgtcatgttgcccaggctggtctcgaactcatgagctcagtgatctgcccatcttggcctcccaaagtgctgagattacaggtgtgagccacagtgcccagcccaattcttctttggatgtctgatagaactcagctgtgaaaccatctggtcctggacttttttgtgttgttggcattttttaaattactgtttcaatcttgctacttgttcttggtctgttcagtttctatttcttcctggtttaatctaagagggttgtatatttccagaatgtctccatctcctccaggttttctagtttgtgtgcataaaggtgttcacagtagccttgaatgatcttttgtatttctgtggtatcagttgtaatatctcccattttgtttctaagtgagcttatttggattttctctcttcttttcttggttaatctcaagaatggtctatcaatttctttatcttgtcaaagaaccagctttttgtttcatttatcttttgtattttttgtttggatttcatttaattctgctctgatctttgttatttcttttcttctgctgggtttgggtttcgtttgttcttgtttctctagttccttaaggtgtgaacttagattgtctatttgttctttcggatttttttttttattgttcattcttgggtgtttctcgcagagggggatttggcagggtcataggacaatagtggagggaaggtcagcagataaacaagtgaacaaaggtctctggttttcctaggcagaggaccctgcggccttccgcagtgtttgtgtccctgggtacttgagattagggagtggtgatgactcttaacgagcatgctgccttcaagcatctgtttaacaaagcacatcttgcactgcccttaatccatttaaccctgagtggacacagcacatgtttcagagagcacagggttgggggtagggtcacagatcaacaggataagaatttttcttagtacagagcaaaatgaaaagtctcccatgtctacctctttctacacagacacggcaaccatccgatttctcaatcttttccccacctttcccccctttctattccacaaaaccaccattgtcatcatggcccgttctcaatgagctgttgggtacacctcccagacggggtggtggccaggcagaggggctcctcacttcccagtaggggcggccgggcagaggcgcccctcacctcccgggtggggcggctggccaggcgaggggctgacctcctcacctccctcccggacggggcggctggccgggcagaggggctcctcacttcccagtaggggcggccgggcagaagtgcccctcatctcccggacgaggcggctggccgggcggggggctgacccccccacctccctcccggacggggtggctggctgggcagggggctgacccccccacctccctcccggacggggtggctggctgggcggggggctgatccccccacctccctcccggatggggcggctggccgggcggggggctgaccccaccacctccctcccggacggggcggctggccgggcggggggctgattcccccacctccctcccggacggggtggctggccgggcagaggggctcctcacttcccagtaggggaggccgggcagaggcgcccctcacctcccggacggggcggctggccgggcgggggtgctgacccccccacctccctcccggacggggcagctggccgggcagagggactcctcacttcccagtaggggcggccgggcagaggcgcccctcacctcctggccggggcggctggccgggcggggggctgacctccccaccacctcccgcccggacggggcggctggccgggaggggagctgacccccccacctccctcccggacggggcggctggccgggcgggggctgacccccacctccctcccggacggggtggctgccaggcggagacgctcctcacttcccagacggggtggctgccgggcagaggggctcctcacttctcatacggggcggctgccgggcggaggggctcctcacttctcagacggggcagttgccaggcggagggtctcctctcttctcagacggggcggccaggcagagacgctcctcacctcccagacagggtcgcggccgggtagaggtgctcctcacatcccagacggggcagcggggcagaggcgctccccacatctcagacgatgggcggccgggcagagatgctcctcacttcctagatgggatggcggccgggaagaggcactcctcacttcctagatgggatggcggccgggcagagacactcctcactttccagactgggcagccaggcagaggggctcctcacgtcccagacgatgggcggccagacagagacgctcctcacttcccagacggggtggcggctgggcagaggctgcaatctcggcactttgggaggccaaggcaggcggctgggaggtggaggttgtagcgagctgagatcacgccactgcactccagcctgggcaccattgagcactgagtgaacgagactccgtctgcaatcccggcacctcgggaggccgaggctggcggatcactcgcggttaggagctggagaccagcccggccatcacagcgaaaccccgtctccaccaaaaaaatacgaaaaccagtcaggcgtggcggcgcgcgcctgcaatcgcaggcactcggcaggctgaggcaggagaatcaggcagggaggttgcagtgagccgagatggcagcagtacagtccagcttcggctcggcatcagagggagaccatggaaagagggagagggagagggaggagaaggagaaggagagggagagggagagggagagggagagggagagggagagggagagggagagggagagggctctttaggattttttgatgtaggcatataatgctatgaactttcctcttagcactacttttgctacatcccagaagctttcataggttgtgtcactcttattcagttgaaataatttttttaatttccatcatgattttactcaaataacatgcagaagcagcttatataatttccatgcgtgtgtgtagttttgagggttccttttggagttaatttccaattttattccactgtggtctaagagagtacttgatatagtttccattttcttaaacttattgagacttgttttgtggcctatcatgtggtcgatcttggagaatgttctatgtgctgatgaaaagaatgtatattctgcagttgttaggtagaatgttctgtaaatatccgttaagtccagttgctctaggttatagtttaagtccattgtttctttgttgactgtcttgatgacctgtctagtgctgtcagtagagtactgaagtcccctactattactgtattgccatctatctcatttcttagttctagtagtaattgttttatacatttgggagctccagtgttcggtacatatatagttagaattgtgatattttcctgttggactaatcctttttatcattatataatgtctctctttgtcttttttaactgctgttgctttaaagtctgttctgtctaatataaaaatagctactcctgcttgcttttggtttccatttgcatggaatatttttttccacccctttaccttaagtttccatgagtccttatgcgttaggtgagcctcttgaagacagaagatacttttttggtggatttttattcattcttccattctgcatcttttaactggggcacttaggccatttacattcaatgttaatactgagatgtgaggtagtgttctgttcatcatgctcattgttccctgaattccttgggtttcttttttattgtgttattgttttataggccctgtgaaatttatgctttaaggaggttccagtttgttgtattacaaagttttattaccagatccagaactccttttagcatttcttgtagtgcttgtttggtagtgacaaattctcttaacatttgtcagtctgagaaagattttatctcccctttgttcatgaagtttagttttgctggatacaaaattcttggctgataattttgttcaaggaggctaaaagtagaaccccaatcccttctggcttgtagggcttctgttgagaaatctgctgttaatctgataggttttcctttatagtttacctgatgcctttgcctcacagctcttaagatttgttccttcaccttaactttagataacctgatgactatctgcccaggtgatgatcttttcgcaatgaatttccagggtgttctttgagcttcttgtatttggtcatctagatgtctagtaagaccaggggaggtttcctcaattattcccttcagtaagttttccaaacttttagatttcagttctttctcaggaacaccaattattcttatgtttggttgtttaacataatcccaaatttattggaggctttattcatttttctttgtctttgtcagattgtgttaatttgaaagccatgtcttcgagctctgacattctttcttccacctgtttgattctattgttgaaacttcccaatgtattttgcatttctttaagtgtgtctttcatttccagaaattgtgattatcttttctttacggtttctatttctctggagacattttcccccatggtccttcaagattttatttatttttattttttagctccataggttatttgggaacaggtgatgtttcatctcacgaataagttctttagtggtgatttctgagattgtggtgcactcatcactcaaacactatacactatacccaatttgtagtcttttatccctcactcccctcccaccctttcccccaagtccccaaagtccattgtatcattcttatgcctttgcatcttcatagcttagctctcacttatgagtgggaacatacaatgtttggttttctattcctgagttacttaacttagaataatggtctccagagaatttttcattcatatcctgtattttttttaatttccttaagttggtgttcatctttctctggtacttcattgagtagcttaatagtcaaccttctgaattctttatctggcaattcagagccttcttccttttttttttttttttttttttttttttttctttttgagacagtctcactcagttgcccaggcttgagagatttcttcctttttttttttctttttttttttttttccccccctttttgagatagtctcacttggtcacctggacttgacagatttcttccttttttttttttttttctttttgagacagtctcactcagtcacccaggcctaagtgcagtgccacgatctcaattcactgcaacctttgcctcctgggttcaagtgattctcctgcctcagcctccctagtagctgggactacaggcatatgccaccatgtctggctcattttgtatttttagtagagatggggtttcaccatgatggtcaggctggtctcaaactcctcacctcaagtgatccaccctcctcagcatcccaaaatgttgagattacaggcatgagccaccgtgcctggcccagtaatttcttcttggtttgggtccattgctggaaagctagtgtgatcttttgggggtgttatagaaccttgttttgctatattaccagaattacttttctggttctttctcatttgggtagactgttttagtggaaaaatctggaactcaagggctgctcttcaggttcttttgtcccatggggtgatcccttgatatggtgctctcccccttcccctagagatggaacttcctgagagtgagactgcagtgattgttatttgtcttctgggtctagccacccagcagggatactgggctctgggctggtgctggggaatgtctgcaaagagtcctgtgatgtgatctgtcttcaggtctcccagcagtggatacaagtacctgctctggtggaggtggcaaagagtgaaatggactctgtgggagtgcttggttgtagtttggtttagtgcactggttttctcaaatgctggtcatgctagcagttaagctgtcacatggacaaactcaggatctctggttgaccagggtgttgcaaacagtggaatgagatattgttttctccttctttggagcaggtttgttccttatgagttgctgtaatggctttagattgttggcccccagccaggaggtggcactttcaagagagcaccagctacgatagtagaagggggatataagcttgccctacattggccaggataaataatggggtttctcaggtgacggttggggccacagagctcccatttatgtcttttgtctttggctaccagggtgggtagagaaaaaccatcaggggaaggcagggttaggtgggtctgagcacagactctccttgggcagggcttgctgcagccactgtgggggacggaaggggtggttctcagaccactggagttatgttcccagggggaatatggctgcctttgctgcatcatacatatcaccagggaagtggggaaaaccagcagtgacaggtgtcacccagcttccatgcagccagaaaggccagtctcactcccatcatgacccaccaatagcactgagtttatgtccaggcagcagggctgagatcttcccccaggctaccagcctccccactgagaaagcaagcagggctatcaggtcttgcctctccctgcctgccttattacagaggtcagctagaagcttccttcaccctttggcccctcccccaattctgctggctgcctttcccaaggatccctgtgagataaggccagggatggcttccctgggcttggactggagaccaggggtgcctacagggctctttctattgcttcttctacttttatattttgctcggttccttaaatctgctttagctctaggtaaggttaaatccttctctcccatgatctgattttcaggttccctagtggggatgtgggtttggaggcagacttttctccctctcacacattgaaaactcagtttttcagctgccttgcagagtttgcagcggcaagctgcttctttcaaagggtatgtgaattcttttggttttgcttgtatcttcctgtagtgattcttgtagagaaagttcacaatgtgagtctccacacggtgttctgtccaaccaagggggagctgcatgttagtcccgtctcctaaccgccattttcctagcatttcccagcctcagtttggtcatttataaaatgaaaataataatgccctacttcatgaagctgttaggaatattaaatgacaatatataagcaataaaggcaatgtctggtaggtgttcaataaagggtagctgctatcattattattgttgcttattttattagctttattctctctcttccttaatgggcccacattctttgcctacctcactgagactgtaagtggaagagaccattttggccctgagatttatccccgaagactccttcaggcgtttgttcctcgggctttagatgaatgggtttggcatggccatgactactacgtacagcacgggggctgctgagtctcctctaccaagctgttccattgaccagggagatgacaccaaggtgagggctgcaggcacttctctggggaaaagaagactctgaggatagctgagaccatacagataaagaaaaagatgatataatccagtatgacagggccagtagaaaggctaaaattaaaaattgataataccaggtgttgacaagaatgtcgagaaattggaactctcaaatattccaaaggggatgtaaactagtctgaccattttggaaaactatttatcagtttctaagaaagtgagacatataaccaccttttgacccagcagttctgttcctaggtatataacaaggagaaatgaaaacataacaaggagaaatgaaaacataacaaggagaaatgaaagcaccatctgattggctgaatggtcatcaatgaggttcgcacaccaggctgctgacttcacctggaaccggcagcctggcccccaggcttcaggccatccctggcttgaaggtggggtttcaccaggacctgccccttcccacctaggaacctgtctgccttttacatgctgtctgtggtacccaggctgtccacactgagaggcatctgtaggcccatgccaagctgccctcacaccgccctccccagactcccctcccacactctttggtgtccaaagtctggagggggcagaggcagcagggggctggcacgtcagccccctgagtgtgtgcacacctggctgggttgcaacaatgcccaggctcggccacaactttgctctgccctggagcaggtgccaggagtagggagaggccagagcagagcaggcactttcaagcccgtgggggcagggggcttcctggacccctaagagtgcagggatgcttgggtccagagccacggctgggcagctgcagctgcgcctaggagtgtggggctcctgcctcaccaacttggtagggggtggggctcccacctcttcccagcccctgccagctccaccgagcacgcagccctggccgcacctcccctgctgcagctggcatccccgcagcagctgctccagatgggccaccactatcacttctgcataaactatggttcccaggtacttcccacatgcccaaatccttccacttttcttcttgtttaaataccacttccccccggaagttctccctgaacactcaagccacaggtgcagtttcatttcagtacctagggcacttattgccaagcactgtaacttgctgtgcccaagtcttctccccgcaacctgttaactatgaaatgtgcatcctcaaaactttataccctcaaacatgaaagaatcatcagtttactcctctcaatttaccagggagaaagctgagactcacaggggagaaatgcctcacctagggtcaaaagctagtggggacttgaatatctcactcattccacaacttctctgacactcctcagagatcaacaaggctgggaccccatatgctgagtaaatattatcaagtgaatgaatagtcaagctagagaagttcattccatgggacgtgactatcagttccacaagaactaaaaggcatatggcccaggtagagaaaggaaagatgagagaacaagactgtcctcaggagaaactggtccagcctgggaagttaggttggcccctccagatccaggagggctactctgccgaggccaatgaggacacgacagtcaaaaggcttcagaacaaggaacagaagtcattttgctctgacaccagctggacaaggctgagatccccacaactccaacctgagcaaaggagtaacagagagcgccaaccctgaagtccacaaagaacagctccacatggggtgtgaggctcggctgccacgatccctgaacctactgtcctggagcaaatctgctggcaattccagcccttcctctcctcccccaggttctgggtgaggtgggacctcagaggttgaggcaggcctggagctcagggaagggcacccgcagctccacttcactgctcacagtggaattaggaggaagagctcttccccgagcagaggaatcacatggtgaggtcgcagctttaggggtgatggttgtagctcagggtgggaaaaaccagggagaagaggccagggtcactaacacaccccgtccctcacatgccatcctgcatagaaggggcaggggagtgacagcatcatcctctgagcacagcagaccagcacagccagtcaccacactgagaggcatctacctcagttctggcttcccacacacctcgatgccccctctcctactcagttctctagcacaagagaggaggggaggctgcactagctgaggactgaggagtcctcaaggggccagtggtttcagaggccaccataactctccacagaatttccaggctaatcaattagtgggtggcccctctcctcccagcctgcaggccactcctcctgcctttggctgctgaggccaatcttcctctccagggcacacctgctgtaactccccctttgcctgaagcagattagcctctgtgggtgagctgtggagggcagagctcgttaatgcttgcagacttgctgggaggaagcagaagaatcatggcagaaagggaaggggagtaaatcaagcgtctgagggagagcaatacacgagaacgacctgccaacgtgtggcacgcagcacagggaagtggatgaaccataggtgggttcggagcccaggatctggactctgactgatcccctgattactgagcgactgcagacacagttctccgggtgctgctttccctgtctatgacatgggtgttgggtggaatgatatctaggaatcattgccagctgcctgataccaggatagaatggtgagttctttgtctttgtcttactcatctccgaatgcctcccccaccagtgctcaagtacctgcctggcatggagtagatacaacagttaagatgtttgaatacattattgaagacaaatgagtaagaagttggcagaaggaagtagaggagaagagatccttggaatacaaagggctcatccaggactaagactgtggttaaagagaaagctactgggcacaccatcaagagaagaatctgggctggccaaggagagactggatttaaggaattggatagaaacccccaggcctgagagcgtgggggccactgatggtttccctgtttaccactgcccactctccactctgttgaggcaggcggacttgaggcaagagagagcgagaggaaggagggaaccggtatgtggatgtttgcgtgtaagattcacgtgtgtgcctcagtgtgtctgggagcatctattgaggttttatgtctctggcatttgtttgggggcagggcatctttgttgggtgttgcatgtgtatgtggcatatatgatttatgtttttctctagtgcacggatctctgtaggtgtctacgtctgtgtgtaagggactgagtgtttgtatgtgcccatatattcatatattcctgtcccggtgggtgtgcgtgtctctggcatgtctgtgtgcctggacatatcgggatacatccgtgtgtgtctgtgtgcaagcgtgtatccctgtgcacttccgtgtcttggggcatctgaatgtgcgctccaaaagtgaccattttagcatggagttgaaggcagtgagctgcctcaaacatagggttttttttttttttttaaattctagatcctaagcatccctgcctcattttgcgaccttaaataatcaatccttcctgcccaattcaaagcagacacctgcctgacctgggcctgaggaaagggctatgtgtccacaacagcagctcagcatccagggagcccagccctgtgcctcgtgtttcaacaggagctgacacaaactcagtcatcatatctccccatcgcctgaagtcgtcaggagatggggaaggaaactgacatttatgaagcacctactatttgcaaagtgtttataagcaaactgtgaggatggtatttttatcctacttttggagaaaaaaaaatgaagctcaaagaggttaagaagcttcctggagtttctcttgtatttcctttgtacgtggaaaggaattctttctagaattctctcctactcctatgtgtccactgaatgccttgtccttcaagctcgccctgctcaaatgccacctcttctgtggagtcttccctgactttgccaggaaagttaggacaaaaccttgtgccgagcctgaggtcagatgaggaaagacaaacatttgtcttcagaaggctcatcatctagcagggaagatcagcattacagaaaaaacaaaaacaaaacaaaaaacagaaaagaaatcctcactttataccagcaaatgagggccaagttcccaatgagagatacaagaagcaggagtgaggtgttcgtgtgggctgggaagtcaagaaaggaggtggggtttcctggaggagtggagctgggcggggtactgggatagggtaggaagagtatttcaggtagggaggagcatacagggaaggcatgtgagaaggagggggccatgctggaaagctctggatgtgtggctgagccaccggcactctatctaacaggcaacgggatatttgtatgagtgcaaacggctcagccctgcatccagtaggcaagagggaaactggcaggaaagtaaagttgagtgggaaaactatggctcaggaattcccagagcccttatagctgtggcgttctctctatatacagcttctgtctcagcccacaggaaacccactgaagtctctgggctgagatggatgacaacacatttgccttcaagactgggtacctctggctgggagggagaccagccaacaatctctgcagagagtactgagttctggcatgctgcccttcaggtgagaaaacccaacatttctctgctatcttcttttcctcatgtcctattttcctccctgaccccacgtccaaactctgccttacagcactagggaggaagaggccacattttagctctaagcaacccacaaaacatcttcttataccttcacattctctttcccctgcctgaaatgccctttccactcccaagcatctgtatatctggtggtctcctactcattcttccaaaatcagctcgaattccacttattctttggaatcttctccaaatcgtctagcagaggaaaccactcccactttgttcatgcagttagtgtagtgcttattacattgtgcctagctggaggtcaaggacaacgactggcctttcttcagagccccggaacccagcacaatgccggacccaataaaggcactcaataaaggggcatgaattgtacggctgagccatcatacggctagagcattgtgtccaactcctgttaacatggacaaagcagagagtgaccagaatggaaaaggacctaaaaatatggctctataagaaaagatctaaggtactaggggtgtttgggttgaagaaaagaatagtggaataggttcctttggccactatgtgaaaagctgcagagaaagcaggcttggcatgtgtagctctgaggccaaaattggaatcatttgtagaagtcacaggaaagcagacttcagctgagattaagaaaaagacttaaacaactacagtcctccagcgctggactggcctatctcaagaagccatcagggaacagagagaaaccatcagaagctgaggaaaaaggaactaacatctattagcatccgttccctgctacacttctgtatgtgcattacctctttaatcttgacatcaaccgtgtaagagaggcctcaatatccccattatagatgaagagactgaagaggaaatgaagtgggtccacgtttccacagccagtcaggatgaaaatccaggtggctctaaagctagtgctcttctcactgcatcacacaacctgcctaagaggagtttggggagtgcaggttaggagtcagttgagaagaatcctacaactgaagagaatggattggaggggtgccaaggtcctggctctctgatgctactactctatactggggcaaggggtggggttggaaggggcatagcagatgatttccctgggacggcaactgggtgacaatgatagagaagcagcaaaatataaaaaatgttatatatctggttaccttaggaagttgacagcagtttgccttggagtttgtccatcaccctctccttcacggtcccttcacctctgttttcattcattgctcttccaaaagcttcattcaacaaatatttattgaataaatattgtatacaaatatttattgaataaatattgtatacaaatatttattgaataaatattgtatacaatatttattgaataaatattgtatacaaatatttattgaataaatattatatacagatcactgcacaagacagtgagatgtagctccttcctgcaaggagcttccctgctaagacctgacttagtccatcctccaggatttcaccaaagcctggagctttcctggcaaagggtaggtgtgctagattggttgaacactgctagaaaccttggagcaatgggagaaaagaatgtggtgttttaaggaagagattaaatgggggacaaaatgagtacattgtttctgagataactgaagtcacttggttaactgagaaatttaaaagtgttttctccagttgattttgtgcactgaggacagagcaaggacaagcctttcccagtgtcatgtgcggatgttttactctcttcactccatgcctcctctgccaacaactccacacaatctcttcatgcagtctgcaatgccctccctgtcccacacaacatcatgtctgtttggtgaacctgattcattcaccaagacccagttcaagtctctcctcttctttgaattcttcccaaatttctctaggaagaataatttactcctgcttggttcatgaaattaataaagtattaaacatgctgcaagctactgcacgtcaaactgtttgggggcagaagctaagactcattcatcttcctgctctctacagtatctagtacaggggtcagcaaattgtccaaatccagaccaccacctgttttgcaaataaagttttattggaacagtactgtggccattcatttactttttgttgatggctgcttttgcactgcaacttctgagctgagttgttgcaacaagaccatatggaccacaagcctaaaatattaactatatgattctttaccaaaaaaaaaagcttgtctggccaggcacagtggctcacgcctgtaatcccagcactttgggaggccaaggcgggtggatcacctgagatcgggagttcgagaccagcctgaccaacatggagaaacccggtctctactaaaaaaaatacaaaattagccgggcgtggtggcgcatgcctgtaatcccagctactcgggaggctgaggcaggagaattgcttgaacccaggaggcagaggttgcggtgagctgagatcatgccattgaactccagcctgggcaacaagagtgaaactccgtctcaaaataaataaataaataaataaatcttgtcaattcctgaagaaccatataatgtgtggtcaacaaatgaatggtaaatgcagtaaggtgctttatgaagaaatttagactggtactcaaatggcctgggtccgaattctgctcctaattgtttaaacaaataatgatgattaagtaaatagatgttagatagattacacagatgatacacagatcacatagacagcaaagacagatggatagatgatagaggaggatagatagatagatagatagaggagtttggatagatagatgatagaggagttttgagtgcttattatatgccaggcactgtgcgaagtattttaaacttattcactgtatccaacaaccaattccatgggtagccactaatattttcctcattaaagaagaagaaactgaggctcagaaaggtctcaacacctttgtggtagagccaggattcaaagcaggtctgacctacaccaaagtctgagagttacccactacgctagaacactcttctgagattccgtttcttcataaaattaagattattggatgagcaacgtgattttcaatccatttagcaagcagaaatttgtatatttataaacatatattaaaatgtatatctggaacctcaacatgcaggaagtctacccggagttctagaatttcggccggctgcctcctccctcccctcggcattcccacctgtcagtccactccatggctccgaccaacctcacatctgcccccgtgttcctcctcctcggcctggtggacggaacagacgcccacccgctgctgttcctgctctgccttggcatctatctgctcaacgccctgagcaacctgagcatggtggcgctggtgagatccgacggggccctccgctcccccatgtattacttcttgggtcacctgagcctcgtggacgtctgctttaccaccgtcacggtccccaggctgctggccggcctgctccacccgggccaggccatatccttccaggcgtgctttgccgagatgtacttcttcgtggctctgggcatcaccgagagctacctcctggcggccatgtcctacgaccgcccgacggcggcgtgccggcccctgcgctacggcgcgctggtgacgccatggcgctgcgcctcgctggtgcgtgcgtcgtgggccgtgacgcacctgcactcgctgctgcacacgctgctcctctccgcgctctcctacccctaccccacccccgtgcgccccttcttttgcgacatgacggtgatgctgagcttggcgacctcggacacgtccgccgcggagacggccatcttctccgagggcctggccgtggtgttggccccgctgctcctcgtgttccttttcctacgcgcgcatcctggtcgcggtgctcggcttgccggcggccggcgccgcgccttctccacctgcggggcccacctagtggcggtggcggtggcgcttttctttggctctgtcctctccgtgtatttcccgccgtcgtctgcctactcagcccgctacgaccgcctggccagcgtggtctacgctgtcatcacgccgaccttgaaccctttcatcaacagccttcgcaacaaagaggtcaagggcgccctgaaaagggggctcagatggagggctgcaccccaagaggcgtgagggcaaatctggctcactggcattttcatgataacagttacagaaaaaaaaaccttgttttttggctttctaaagcactattaatttcgatctaccctgtcttatttctgttaaataagaaattagacccgaagtaaatatgacaaagtgtttactgtagtgatagatacatagtaggttgaattcgtgtgttatctgaatgtgtgagatagattctacttttaaattttgggtaaatgaaaagacagcaaatggaggtagacaaatagtttgtgaagagggagaagaaagagtgtgactagcaggaacccggtgggtggacgggaagcctgtgaagcaatggataatttttttttttttttgagatagtgcctccctctggcgcccacgctgagtgcagtggtgccatctcggctcactacaacttccgcctcccgggttcaagctattctcctgcctcagtctcccaagtagccaggattacaggcacctgccaccgcacccggctaattttttttgtgttttctttactagagacagggtttcactatgttgaccaggctggtctcgaactcctggcctcaagtgatccccctgcctgggcctgccaaagtgctgggattacaggcgtgagcctccgcatccagcccaggggaggatcttaaagaggtgtttgttgttggatgcccctgcagactcctcctggagaaacttcaagatccagttattttttaagtggcttaaaataatttaaattcttttcctagatactgtatcaaccatttttaatgtaaaaattcagagttgaagttctgtttgactaccacccaaatcaacctctaccgccatcccaattatcagttgaatctcttgctctcaccttcactcttgctctcaccttcactcttgctctctcgctctgattttgaaacaaatagtgtcattctatttatatatattattctgatcttgaaacataaatagtgtcattctatttatatctattattcttcagtttcctttttttatgaaacaatacatctagaagatcttgtcttattaccacaaatagaatgccttcattcttaacttcatgctatacaatcctatactgtggatcttccacagtttaatcactcccttattaataaatatttatgtttttctaatttttcactattgcaaggttgtaatggaaattcttgcaataaaaataataaaagctggtcgggcatggtggctcacgcctgtaatcccagaactttgggaggccgaggcaggtggatcacctgaggtcagaagttcaagagcagcctggccaacatggtgaaaccctgtctctactaaaaatacaaaaattagctgagtgtggtgaagggcgcctgtaatcccagctactggggaggttgaggcaggagaatcacttcaacccgcaaggtggtggaggttgcagtgaaccgagattgtaccactgcattccagcctaggcgacagagtgagactctgtctcaaaaaaaataaaaataaagctaacatttagtgaggaactgttacatggcaagcacttttaaaaagaatataatcacaaaggaagattttttaaatctttctaaaacttctcaagtaaatttaaaaatcaaaataagacttctacgcaaagacaaactgcaaaacctggctcaatatatacaatgtctgactagaccattaaaataaatatttgaggagggaaaacttagactaataatataaaataagccaaaaaattatctctaatgaaagtctcgaagccgacaagcatatgaaaacatattcaacattattattcatcagggaaatacaaattaaaatcgtaagatactactacatacccatcagaatagctagaaacaaaagattgatagtatcaaatgttagcaaggatgtggagaaattaacaccctcatatattgctagtaagaatgtaaaagaataaaactgttctgcaaactatttgcagtgcccaaagttttaatatttacccagcctacagcccagaaattttgctcctgaagtacccaaaataaatgaaaacaaaagatgtgtattagaattctcacagaggcttcagtcatagtagctaaaactgaaaaacccaaatgttcatcagcagaaagaataagtacggtggcataatcatttcaatggtgtactatgtagcagtgaaaaagattgaactctgatgattcacacgacatagataaatctttaaaacattatgatgagtaaaagaatccagaaaaaaaaatattgtatgattccatctattcaaagttcatgagctggcaaatttctctctggcagtagaaaccagagtagtcattacctctggatgtgggtggggactcacgaggagggggcacaaggaaaatttctgaagtgacataaatcctctgtatcttgatctgtacagtggtcacacgggtgtcaaattcagcaagctgtacacttaagattcgtgcactatatttaaattatattacagtaaaaaaatccttgggtgaggaagctttctgggtttttcaaaatttcaaggaccaaatactccccttttcagacgctcaaggaataatccccaggctctatataattcattccagaaccaaaaattaagtaaaattaaaatagctaatttactaaagaagaaaaatacaagacacgaatacaattatagaccagttctatctgtgaaaattgatatcaaaatgatgtctaaagcacaaataatcccatcttttcatatttgaaatcacactaatatgttcaatttaaacatttaggattacctcatcagaggcaaaaaggcttcttaaaaaatcaataccagttcctgatcaaagctcagaataaaataaaaagctacatctttaacaaaatgtgttagagtcagccaaggctgtatcttatcctctctctggatgagaacattctttaattctctaaatggcaataaaatggaaattataggacccctaggtaatcctattaaaagattttgctctccctttattctttatcaactataataccaggtataatgtacactgctcccagcgaggattcttcaatgcttcaaacagcttcagtgcctctgaactcagcagtggattgcttgccctggacctaccatctaagtctctgctagcagcactgaatgactcgtacataacaacgacattgtagttacatacgagaatgttcttttgaggagattcagaactctaaattatatagtgatgaagtgtcttgatgtctgaacattatctcaagaggctcagccattaaaaaagaataaaaaagaaagaaatagggttggggagagtataaataagaaagagagggagggagggaggaacagagagaaattgacatatgctacaaaaatgagcaaatggaatgtggcctgatttgagaaatttatggagtgtgagaaagggaaactaatttgacattaagcttgtaacctttgctctgactatcacaggtttaataatgtaggatttttttttaaatctatgagttcaatcatacatcttgcttctgaagtggtaatatttacataattataatattataaattttgttttccatttttatttttaaaaacaaatctctcatttcgtgtatattgattgtggcatataaacttcaaacttgctacaaaattcttggtcttactaaagtgcagaataaggaaaaaaagaaacgatgatgttccagatataatagcagaaaactgtttagaaatgcaagtgcagacttgaaaatcaaaaggaaacttttgtgctataaaaaattataataaaagtcagcaaatacaaaaatatagactgatgaaaaaataatcctacatgcatcagtggggggaaagatgaccatataagaagtagagaaaagagagaatatcagccttacttcagattttttcacagctatttcagaaaatgagttatagatgagagaacagatgtccacaaattttatacctagctaagtcatccttcagatatataaatacatatgcaaaagaaaaatctaaaatatgtgaaaattcaataaatataacatggatgtactagtcctttaaaaatgacttgatgcaatgcaaccaaccaaggaattagtcaaaattaaaaactcgagaatttaaaagtcataatattaaaaggatggtatgtaaaaatttatttaacaataataaagaaaaatatgtgttatggtaataaatgcagatagcatgctttatcttttaataacaaagttgaatttaaggcaaacagcattacagagaccaaaattcactgctataataaaggaaataaaaagattgttttagggtaaggccaggttggaaaagacaatataggtataaaaaatatatcaggaaaaaatgatatgacagagatagaatgattttaacattttagtaagaataagttaagaaggaaacatatggatcaatagaacagaatagaatccagaaacagaaccaaccatcttgagttaatttttgtatatggtgtaaggaaggggtccagttttaatcttccacatttggctagccagttatcccagcaccatttattgaatatggaattctttcaccattgcttgtttttgacagctttgttgaagatcagatagttataggtatgcaatcttatttctgggttctgtattctcttctattggtctatgtgtctgtttttgtaccagtaccacgctgttttggttactgtacccctgctgtatagtttgaagtgatgcctccagctttgctctttttgctttagattgccttgactatttgggctcttttttggctccatatgaattttaaaatcgttttctctagttctgtgaagaatgtcaatgtttagtttagtttataggaataacactgaatctataaattgctttgggcaatatagccattttaataatatttattcttcctatccatgaacatggaaggtttttccgctcatttgtgtcatctctgatttctctgagcagtggtttgtagttctccttgtaaagaccattcacctccctagttagctgtattcacagatattttattctttttgtggcagttgtgaatgggagtggattcctgacttggctctctgcttgactgttgttggtgtataggagaacacctggacacagaggggagcaacacacactggggactattggaaggtagagaatgggaggagggagaggatcaggaaaaataactagggttatttttctacaagttacccagataattaaatagtgaaaaggatagcatttttcaacaattcatggtctaaaactggatacatccccaaaactatcaaaagtgaaagaatgaacaaatcacggtgtctttatacaatggaatactactcagtaataaaaaagtcactgatctacacaattacatatgggtactaggcttaatatcttggagatgaaataatctgtacaacaaacccccatgatacaagtttacctgtgtaacaaacctgcacatgtacccctgaacttaaaagttaaaaaaaatagatccaactatatatggtcaactgactttctacaagttacccagataattaaatagggaaaatgatagcatttttcaacaattcatggtctaaaactggatacatccccaaaactatcaaaagtgaaagaatgaacaaatcacggtgtctttatacaatggaatactactcagtaataaaaaagtcactgatctacacaattacatgatgaaatctacaaaacattatgcagagctgaagtagccagatacaaagagtacatactaaatgattccacttatgtgaagttcaaagcaggcaaatctcatttgcagtgatataaatcagatagataaaaatcagattagtggcaggaagagcttaattgcaagggtacacattgaattatgaagtgatggagttattctagatttggattggggtagaggttacatgacataaaagtcccctattcccacatcattgctattaccatagaaggtcaatcatttctaaattttccaagtatgtggtcattcaataatcccttattgtttttcaacggtttttttgtttgtttgttttgttttgttgtgctttgctttgttttgtttttgtttttgagacacagtctcactgcaatgcccaggctggagtgcagtggcactatctcagctcactgcaacctccgcctcctgggttcaagcaattttcttgcctcagccttttgagtagctgggattataggtgcgtgccaccacgcccagctaatttttgtatttttagtagagacagggtttcactgtattgaccaggctcatcttgaactcctgaccacgagtgatccgcccatctcagcctcccaaagtgctgggattacaggtgtgaatcaccgcacccagcctttttcaagtttttttcctggttaacactaaagctgaacgtcttcttatattgtttattctttatgaattttctgttaatattctttgtacatttttattcagttgtgttttatttttattagattataggagctctttgtatattttaaatttcaatctcgtgtttattagacatgttatagcctgttacttctttttcaaatttctgttatcttttgtcccagaaaactttcctatttctatctggtcaaatatgtcaacatttttatacagcttctgagttttgcataaattataaatattattttatattagagtatttttatagattgtaatttaagtttagctttttaaggcacctaaaatataatttacttgtactgtaaaaatttcatttactattttcccatgtcaattccccggtagtatatcccttctcccattgattttcttaatcacaaaataaatcctctgagttttgcataaattataaatattttttatattagagtatttttgtagattgtagtttaagtttagctttttaagccatctaaaatataatttacttgtactgtaaaaatttcatttaatattttcccatgtcaatttccctggtagtgtatctcttctcccattgattttcttaattacaaaataaatcctcacatacacaggactatttttaatgttcttttcactcaattgatcttttttgtcaattcctgaataaatacatactgttttaattattgggttttttcaaatatgtattgatacttggtagaaaaagaacgaatttatggttcctatttttcaaatatttcttataaattttacctttttgtctttcaagagaacttgagaataaacttgtccatctccacaaaaataattccactgggaattttatttggattgcattgaatgtatttgagtagagttgcttttgtgaaagtactgaggtttcaaaacatattaagtggtacagttttaattagactgattttattgcataaaaattaatctttaaaaaactgttaaaattgaggtaccctttccagagtcattatatatgttcatttcttgtagtatcttttataccttttattaaatttttaaaggtttcttccttagttcttgtacttacctttacttgctattaagaattaaatccattttttattgatttttaaattgggtttttctggcataaaggaaagtgatttaaagatcaatcttttttcctgcctctaatacctctgatgtattatgcactgagaaactggtgttaccctaatgaccatatggagattaataaagtatttcaggaaatattaaatgaaaaaggtgaaattcaaaatggtatatatacacatatagaagtggttggtcaggtaactggatgggaggagacatcataaataccaatatgggatcaatgacaaagaagagacttggatggaacatgaaaagtttaatgctgtgcgtgttgaaactgaactgcccatagagtctcaagaagaggtatctattaggcagataagaagaacagttggaagttctggagaaaggctgggcttcagatagagctgtggaggtcggcagaacatacagaaggatgaaagtgatgggcttggatcacatcacttagagggcacaactaagaatacaaactgagtggggcgcagtggctcacgcctgtaatcccagcactttgggaggccgaggtgggcagatcacttgaggtcaggagttcgagaccaccctggtcaacatggtgaaactccatctctactaaaaatatataaattagctgggcgtggagaggtggggcaggagtggggggtgcctgtggtcccagctactcgggaagctgaggtgggagaatcgcgtgagcccaagaggtgggagaatcatgtgagcccaggaggcggaggttgcagttacccgagatgatgccattgcactccagcctgggcaacagagcgagacttatttaaaaaaaaaataaataaataataataataataataataataataaagaatacaaattgaccaatgttggaaacttacgccacaagtggagttaagagttttaaaaagatctatattcctttgggcatatacccaataatgggattgctgggtcaaatggtatttctggttctagatccttgaggaatcgccacactgtcttccacaatggttgaactaattcacactcctatgaatggctgctccctttctttctaaagtgagagaaaatgagaataaactgcagaatcagatagtctggaattttataaaagctcaacaattgacacactgtgtgatgtagaaagttgctgagctacgtacttttcagcatgtaacacagtgttagcatcttctctacttcctgggatctgtcatgagggtaaaatacaaatagaaatatgaagttattttgtaacatccaaaataccaaacagaagagagacattctttttatttattttattttatttatttatttttgagaaggagtcttgctctgtcacccaggctcgagtgcagtggcgcaatctgggctcactgcaagctccgcctcccaggttcacgccattctcctgcctcagcctcccgagtagctgggatacaggtgcccgccaccacgcccggctatttttttgtatttttagtagagacagggttttaccgtgttagccaggatggtcttgatctcctgaccttgtgatccacctgcctcagcctcccaaagtgctgggattacaggtgtgagccatcacgcctggccagaagatagacattccttaaaactgagcttttttaaatttaccagcaactagcttctttcctggtgaaataaattttagggcctcagggtattagttaattccaggtaaagacgaaatacaccgttgtagtaaaagtgttagaaaaatgtattgaaggtcagaccaggtgagaaaagtctatggagatgtgaaaataaatcaggaggagggagaagaggtaaaatggtgtgaaaatttgtgcagggagaatatgtaggagacactcaaagggcggctgggaggttaagctgtttagatcttatttagcactaacctaagattatagagcactatttagaaatgattctatccatgcactttggaaggcctaggtgagcggatcacaaggtcaggagttcaagacctgcctggccaacatggtgaaaccccatctctaaaaatataaaaattagcccgacgtggtggcatttgcctgtaatcccagctactcgggaggctgaggcaggagaattgcttgaacccaggaggcgggggttgcagtgagccaagatcatgccattgcactccagcctgggtgacagagcaagactcagtctcataaataaataaataaataaataaaaataaaatgattccacaagccaggcatggtgcctcacacctgtaatcccagcactttgaaagtccaaggtgggaggatcacttgaggccaggaattcaagaccagcctgagaaacttagggagacctcatctctacaaaaaaatcttaaaattagctgggcgtagtggtgcatgcctgtagtcctagctacttgggaggctgaggcaggagaatcccttgagtccagaaggttgaggttacagtgagccacgattgtgccactgcactccagcctgggcaacagagtgagaccctgtgcgaaatagaaaataaaaataaacaaaaaatttaaaaatttttttaattaaacaaaaatgattctacaatcaaagcaaaattctgagtaacataacaaaatcctgtgataatttaagaatgtggggcatgaagaccatttaaaacagttgttcttaaactacatttttccaagatcaccttgggaagacaaacaggaagtcttagccaggtcaccaagaccctcttccctagttcaactactcagctatgcttcatctccactacatattgaaaaattatgtacgatgccatttcaacaaaaggatggtgaggaaataatttagaataatattccaatattaatatcaatattttactggataaactatgtaatagctccaagtgttatcatcagagagagaagaaagttttcttctgatgaatgactctgctcagggctcccttcatgtctctgttcctcaggctgtagatgaaggggttcagcatgggggtcaccacagtgtacatcatagccatgacagtgtcctttagagtagaactattagctgatgagcataagtagagaccaataacggttccatagaacagtgacaccacagacaggtgggagccacaagtagagaaggccttgcagatacccttagaagaagggaccttgaggatggaggagacaattcttgcataggacccaaggatgagtaggaatgggatgacaagaatgagccctcccatgataaatatcacccattcattaactcgagtgtcagagaaggccagcttcagcagagcagacatatcacagaaaaagtgggggatcacattgtctgcacaaaaacacaacctggccatgagtaaagtgtgtaacatggcatggaaggtggtcagcacccaggacagcgccaccagggcgagacagagcatggggctcatgatggcggtgtagtgcagggggaagcagatggccacatagcggtcataggccatggccacaaggaggaagctctccaggtctccaaataacaggaagaagtacatttgggtcaggcagtccgcataggggatggatgggtcctggttctgcatgttctgtaacaacttgggaatggtcacggaagagaagcagaggtcagagaaggacaagttgctgagaaacaaatacataggcgtgtggagatgggagtccagtcgaatgaggacaatgatgaggaggttccccaggagggtggtaagatacatggccaagaacagggcatagcacaggttttgctgctctggttggatgggcaggcccaggagcaggaagtctgagatgctggtttgattttgtcccatcatgctctgtctccagtatctttaatggaaaaacaacagtatcctttaaaatctgaattttaaaatggagatatttctgtgacacttggtctgctgagtgttctgcgaaaattatttaactgacattataataatcatctctataccacaaatatctataattagaatctctataatcagaaatgacttaactttatcttttttctcttcatttatctttaacatgtaacaatattccatcctttctaaaatactcatctatttacttctgaaacataaagtgtgttggtttctctcttacctgcctcaccagtaactgcagttggctcctcctctgtcagtatcttacatgttgatattcctcagggatttttctaaacttcattttttttttataattctgcataatggccaataaaaacacatctactccaatggctttaattgccatttaaaactcaggtgtaggctgggcgcagtagctcacacctgtaattccaacattttgggaggctgaggtgggtggatcacctgaggctaggagtttgagaccggcctggccaacatggtgaaaccttgtctctactaaaaatacaaaaattagcctggtgtggtggcgggtgcctgtaattcagctactcaggaggctgaggcaggagaattgcttgaacctgggaggcagaggctgcagtgagccaagtttgtgccattgtactccaacctgggtgacagagtaagactctgtcaaagaaagaaaagaaagaaagaaagaaagaaagaaagaaagaaagaaagaaagaaagaaggaaggaaggaaggaaggaaggaaggaaggaaggaaggaaggaaggaaggaaaggaaaggaagaaagaaagaaagaaagagaaagaaagaaagaaagaaagaaagaaagaaagaaagaaagaaagagaaagaaagaaagaaacaaacaaacaactcaggtgttcaggtgtagcgttctctagtatacagaacttagtatcctgagtctcaatgattaacatctcttggatggatcacaggcatctttggcttgacagatcctaaatgacattctgatctcaccctgctcctcttctaactccatcctcctccactctctcatgtttggtgaatggaatccaggctcaagtcagaaacctaaggtttgatttcattaattcatttctctcacagtcaatatccaatctagcaagtcctacagattctgcacttcattctctttctaattcatccactccttatcccaactaccacaaccctaaaccaggtggaaatcttgtattacctggactattgaaactgcttctcaattcatcttcctgcccctgtgtttcaacaaccttctcttccaacaatcttcatttacactgtggcattctgagatgaaaatctgatcatccctctcttgtgattaaatatttcgtggattatcattgttcttaagatagaggcaaaattcctttcaagagcacaaaggatgtttcattacctgaccaacacctgcctccacagcctcacctggccccacaatgactcttgcatcctcttttcagcaatgctggacttatacgtcataatttcttgcctccagcctttcatacttgctattcctcctacctagcacctatccccgctatgccctgtcttcatccggctcattctcacttatccttcaggtctattacatgtaacttgctcagctaaaccttccctgtgtctctgtaaaccaagtgagacctgcttctatgcttccgcagcatctcatactcatccaatagcactccatgctttgactacctgttgacagctgacttccttaccagactgtaaactctgtgcctgaaaggccatgtctgccttcataactgcagcaagacagttgcggcacttggcgtggtgcccagatattgctgatgttttctaaatagctgttggctgtctctcaggctggaacgtgcattcctccaacttaaaaggtagcaaatggccagtaagttagaataactacttctactaaatcctcctggaataagaactcattacctttagcaatttaacactacattttgacactctgttgctgatttcaccaatgtaattttgtgcccgtggaaaatattagggtatctcagatatactactcttttcacaaatacaaatgacccaaaccaaacattcttatgctcaaatctacatcatgtcattgaaattggtgtgagaaaaacaaatatgataataattttataaatgttgggacaaacagaaagaagaaggataatttccaacctcaagccctcatttgagttcatcctcagatattcatatcccatgtgatggttaatttttattttttttatttttaagttctgggatacatgtgcagaatgtgcagatttgttacataggtatacatgtgccatggtggtttgctgcacccatcaacccgacatctaggttttaagccccacacagattaggtatttgtcctaatgctctccctccctttgcccccaaccccccaacaggcccggctgtgtgttgttcccctccctgtgtccacgtgttctcattgctcaactcccacttatgagtgagaacatgaggtgtttggttttctgttcctgtgttagtttgctgagaatgatggtttccagcttcatccatgtccctgcaaaggacatgaactcattcttttttatggctgcatagtattccatggtgtatatgtgccacattttctttatccagtctatcacttggctaggccctggtaccaagttttggtcaaatgccagttctagatgttgtggtaaaggtattttgtaatatgatttacgcttaaatcagtagactttgagtaaagcagactccccctattatgtgataagcctcatagaattagttgaaggccttaagagaaaagaccacagtctcctgaagaagaaagaattatgccttcagactgctcagactcaagactgtaacatcaactctttccctgggtctccagactgcttacctaccctgtggatttcagacttacccatgctcacaatcttgtgagccaatttcttaaaagaatctctctctctctctgccttgatagatatagataggtagatagatagatagatagatagatagatagatagatagatagatagataatgatagatgatagagataggtagatgacgataggtgacagatgatagatagatagatagatagatgatagatagatagatagataatagatagatacaggtagagagatagattagagatagatagatatagatagatgatgatagatgacagatagatgatagacaatagatagatgatagatagctagaggtagagagatagattagagacgataaatagatatttagttaatagatagatagacagacagacagactatgcttatggttctgacttctggagaaccataaaattgtctgtaaagcttcacagataattttaaaacaaaacaaggcttgagaatgactgcattaaagcatacctcacagagctgtcattataccaaaatgataggatcttgtgaggatatattgcacaataagaaatatttgtaagtgctatcattaccaatgactgtaactggaaaacattagttaaaatacttctggaatgttggaaagtcgtgggaggcaaatacatagaaaagaggaaagttattatgactgaaaaaatatcctgcagaacatcctacacctgggaaatcaagaccctcaggctggaaggacaccaagaatcagctcattcacccttctgcccaactcacccagcatctcaaggtaactccacagtcctgacctgacatcctgctccattttatccattacgacacgtaaagtaacagtctctgtagttgtcccctgtgtctggacaactccttctcacatctccccttctacccatccctgagcctcagggaccctgcatcccagaggaatccagattccagagtaactcattaaagacacagtaattaccctggacctctctagaataaatttgctcagactcctacagcagtaactaattaccgtacatgtcatctgtcactgtaatcagtcactgatcgcacctgactgtatttagggctatcatgaggacggagctcatggatggatgcttaatcactgcctgcttaggaaatggagagtagccctgtgtggctgcagcctacattttgggacttgaaaaagaatggccataaaagactgtgaatggcctcaaatatcttagacgtataacatttacacaataaattgacacaaaaaggtaatggtctttaagcagagtaaccactatgaaagacacatgctttgtaaagatatccaggtggtagcgtctcactaaaactcagcttcccataaaaataccccaggatcagacatctgtgactcaatcataagcagatacatagaaaagagatgaaaagaagaaaaaatgagctctctcaggtcatgctcaattcttcctcaggccaaaacagaaaaagaaacccaaattcccacccgcttagttacttttatctccttctctctctaggaaaacttgatagcactcatcactaccattgtgccaaccgctctccacctatgtcagattacctcctaatgccatgttcttcctgtccctacaatggctcacaaggccacagtggacatttatatttttttcttccactacccgttctacgttcccctttcttttggccattatcagctgggtgacattctccacacagtggtaacagtgcaaactttcatccctaggaaatctgcatcccataagccttgctttctcaagttgttatattttttcttaaactttattgatgcacatggaaatactaagtggcaaccaaataattctccaggattttagacatgggcctctcttttccagttgtgtagaacaaccaaattttcccctggtaatcaatatcaatcacactaggcagaatgacaaccctattctttgtatattggcttacatgagtaccaaaaaatgactgggtggtaggcttaacctccaatccagtgaagccactgttacatcacctggtagaagaacacatcccttgagatctataggagacacttatgacacactattttaggttctctcagcctcatctggtatttcagccacagctgaaggaaccagttctgcgatggcttcagctagctttagtgggtgcaactgaaagcacctcagctccttgctgctacataacttccttgcctccttttctgggacttgtacgaccccacagatgtcgtggtgaatctttagcactcacacacatattaaggcctgtgatccactttgaactcgttgtagagtgttaaatgttaaattgaggttacattttatttcttctgcatatggaaacccaatttttccagcgccatttgtggaagactagtcttcactgaattgcttctgtacctttgtcaaaaatcagtgaatgatcagcaccagcatggcacatatatacatatgtaactaacctgcacaatgtgcacatgtaccctaaaacttaaagtataataaaaataaataaataaataaataaataaataaataaataaataatcagtgaatgatacatgagtagatctatttctggactctttatagtattatataccctcaatactcatctacatttctatcctttgtctaatactacacttacctcattattgtaacttaatagttaatttggaaacaagacaatgttagtccttctacattgttctcctctttcaaaactgattttgggtgtatttgtctttacacataaattttataatcagattgtcaaatcatgcacaaaaatttctgtcagaatttttattagaattttgttaactctccagatcagttgctgaagagtcaacatcttaagagtgttgagttttccaatctgtaaaaatgttgtatctacccatttctttttatttgattttaagttctggggtacgtgtacaggatgctcaggtttgttacataggtaaatgtgggccatggtggtttgctgcacatatcaacccatctcccagttattaagcccagcatgcattagctatttttcctgatgctctccctcccctgatcccaccccctataagcccccgatgtgtgttgttcccctccctgtgtccatgtgttttcattgttcagctaccacttataagtgagaatatgtggtacttggttttctgttcctgcattagtttgctgaggataatggcttccagctccatccatgtccctgcaaatgacgtgatctcatttctttttatggctgcatagtattccatagtattccatggtgtatatttaccacatttctttatccagtctatcattgatgagcatttgggttgattccatgtctttgctattgtgaatagtgatgcaatgaacatatacgcattcatgtatctttataatagaatgatttatattcctttgggtatatactcagtaatgggattgctgggttaaatggtatttctgtttttaggtctttgaggaattgccacactgtcttccacaatggttgaactaatttcattcccaccaacagtgtaaaagcattcctttcactccacagcctccccagtatctgttgtttcatgactttttaataattgccattctgactggcatgagatggtatctcaatgtggttttaatttgctttctctaatgatcagcgatgttgagccttttttcacgtttgtttaccgcatgtatgtcttctttcaagaagtgtctgttcatgtcctttgcccactttttaatgggttttttttcttgtaaatttgtttaagttccctgtagacgctagatattagacttttgtcagaaggagagattgcaaaagttttctcccattctataggttgtctgtttgctctgatgatagtttcttttgctgtgcaaaagctttttagtttaattagatcccatttgtcattttttgcttttgttgccattgcttttgatgttttcatcatgaaatctttgcctgtgcctatgtcctagattttcttctagggtttttatagttttgggtttaagccatcttgagttagtttttgtataaggtgtaaggaagggatccagtttcaattttccgaatatggctagccagttctcccaacaccatttattaaataaggaatcctttccccattgcttgtttttgccaagttttttgaaaatcaggtggttgtaggtgtgcagtcttatttcggagttctctattctgttctatcggtctgtgtgtctgtttttgtaccagtaccatgctgttttggttgttgcaggattgtagtatagtttgaagttgggtatctacccatttcttaagtgtttgatttccataaccagtgttgcaggtttcatgtcatagatcttacacatttttgtaagacttatacttaaatatttaataatattgtgctatgtaaagagtactttaatttttttcaacttccacatgttcattgctatttgatataattttaatatattaatattatatatatatttgtatacacaaataaaactttttaatatgttgaccttataccctatgggtttactaaacttgattactggttctagaacccttttttagataattttgtggattctgtacaaacatgaatagagatggtttaatttcttactttccaatatgtatacattttagttctttttattgccctttctcactgcctagtacaatgtttaaaaagagcagtgagttcatttttgtatatggtataaggaaggggtccagtttcaatctcctgcatatggctctccagttatcccagcacaatttattgaatagggaatcctttccccattgcttgtttttgtgaggtttctatctgtcaaagatcagatagttcttggtgtgtggtcttatttctgggttctttattctgttccattggtgcccgtgtgtctgtttttgtaccagtgccatgctgttttggttactgtagccctgtagtatagtttgaatatagtttgaagtcgggtagcgtgatgtcttcggctttgttctttttgcttacgattgccttggctattcaggctgtctttctggctctgtatgaattttaaagtagttttctctaatgctatgaagaatgtcaatggtagtttaataggaataacactgaatctataaattgctttaggcagtatgggcattttaatgatattgattcttcctatccatgagcatggaatgtttttccatttgtgttgtctctgatttctttgaggagtgtattgtagttatccttgtagagatctttcacctccctagttagctgtattcctaggtatattgttctttttgtggcaattgtgaatgggcgtgcattcgtgatttggctctcagcttgactattgctggtgtataggaatgctaatgatttttgcacattaattttgtatcctgagactttactgaagttgtctttcagattaagatgcttttgggccaagactatggagttttctagatataggattatgtaatctgaaaacaggaatgatttaacttattctattcttatttgaatgccctttgcttctttctcttgcctaattgccctggccagaacttccaatactatgttgaataggagtggtgagagacggcatccttgtcttctgccagttttcaaagggaatgcttcccacttttgtctattcagtatgatggtggctatgggtttgtaatagatggctcttattattttcaggtatgttccttcaatacctagtttattgagagtttttaacatgaagggatgttaaatttttttgaaagccttttctgcatctattgagataatcatgtagtttttgtctttagttctgtgtatgtgattaattacatttactgatttatgtatgttgagccaaacttgcatcccggggatgaagcatacttgatcatggtggataagctttttgatgtgctgccggactcagtttgccagaattttgttgaggatttttgcatcaatgttcatcaaggatattggcctgaaattttctttttctgttgtatctctgccaagttttgttatcaggatgatgttagcctcatagaacaagttaggaaggagtccctcatcctcaattttttggaacagtttcagtaggaatggtaccagtaccagctcttctttgtacttctggtcgaattcagctatgaacccatcaggtccaagggtttttttggctggtaggctatttattactgactcaatttcagagctcattgttggtctattcagggcatcaatttcttcctgtttgtctcaggacagtgtagatggccaggaatctatcaatctcttctaagttttctagtttgtttgtacagaggtatttgaagaaatttctgatggttatttttatttctgtggggtcagtggtaatattccctttatcatttctaattgtgtttatttggatcttctctcttttcttctttattaggctagctagtggcctatcttattcattttttttttaaatcaactcctctatttgttgatcttttgaatggtttttcgtgtctcaatttccttcagttcaactccgattttggtaatttcttgtcttctcccagttttggcgttgattctttcttgcttctctaattctttcatttgtgatggtaggttgttaatttgagatctttctaactttcagatgtcagcatgtagtgctatgaattttcctcttaatactgccttagctgtggcccagagattctggtatgttatatcttctttttgagactgagtctcaccctatcgcccagcctagagtgcagtggcatgatcttggctcactgcaatctctgcctcccgggttcaagtgattctcctgcctcagcctcctgagtagctgggattacaggtgcccaccaccatgcctggctacttttttgaatttttagtagagatggggtttcatgttggccaagctggtctcgaactcctgacctctagtgatcctcccacctcggcctcccaaagtgctgggatttcaggcatgagccaccacactcagtgtgttgtatctttgttctcattagtttcaaacaacttcttgatttctgccttgatttcattatttattcaacagttgttcagaatcatgttgtttaatttccatggagttacatggttttgagtgattgtctgatcctaactattttggaggcactgggagacatggaagtagttctggaggacaacaaaaatcatcttgtgagacttcttcctcacatagggtgtttgcatggtcttcaggcaaaaggaggttgctcatttctagcaaggggaagggatacttctgccccagcaagtgaattccggggagtctgaggattcaaaattctcatgttcatccactcaaacaagactcaaggtctcactctttccttcccagggtctgtaatttagcataggagacctacctaagctacatgtgctgcctccttagtagctcttgcacccttagaattaagtctcaggcctgattttcaacaccgtgtgtcaatggttgtagaagattaacgtttcattaaatgttgccatggatattttctggcttttacaaaataaaccctaagttgatagttgactaacctggacctatcattctatttcttccaggcttccaaggaagttaacaaaagctatccctattcttaaaactccaggccaggcacagtggctcatgcctgcaatctcagcattttgggaggctgaggctggaggattgcttgagcccaggagttcaagactagtctgagcaacatagcaaaatcccatctctacaaaaaataaaaattaaaaaaaagcttccagcttttgctcgttcggtatgatggtgggtatgggtttgtaatagatttttttttttaattttttttaaccaggtgtggtgacatgcaccagctcttcaggaggcttaggtaggaggagcgcttgagcctgcaagtgagctatgattgcaccactgctctccagcctggataacagagtgagactctgtctcaaaaaaaatcctaattctaataactaccatggttcttataacattaacttgctggagctaacacatgacacagtgtttctccgtctacctgtacctcatcccaaactaccacaagtgagtcttggtaattgtgatgctatcacatgctagggcttatcacaaaccccacttactccaacagtggtgaatgctccagttccagaatccctcccaaaaccaattgtcttagtttggttcccaccaaagaagagcctgagagaagatgtgtgtgtgtatgtgtatgtgtgtgtgtgtggtttaagcaggaagtcatctcagggagcaagagtgaagttatttatttgggagctagtccccaagagcaagactgatttatgaagagggtgaggcagagaaagaaaaattgtcccttactaacaacatattacgcaagtccccactatgaacactagagattggattgacccagagcatacacaatgtctcccagaattgtgtaaagatgggggctgaggggactttttttttgagacggaatttcgctcttgttccccaggctggagtgcagtggtgtgatcttggctcactgcaacctctgcctcctgggttcaagcgattctcctgcctcagcctcccaagtagctgggattacagccatgtgccaccacgcctggctaatttcgtatttttagtaaagagggggtttctccatgttggtcaggctggtctcgaactcccaacctcgggtgatctgcccgcctcggcctcccaaagtgctgggatcataggcgtgagccactgcgcctggctcctgggatatttatcccctggctccattccccattgtcaagttgccctctgcacttctgagctccacatgtgctgagacagagtaagctcccccactgtttgtggcatcagaggatcccagggaagaggcttcactgtcagcttgcaatggaagcctgcaaggaactatcccctgcaaccatggctgaaatcagaagacaagcatcttgtctcctttgttctccagatgtgaagcagaacatctgatctgtctgctacaatctactttgcagaagtgttaggaagactgatagaccctccaggcttgtacggttcttagcaaattaccatgtaaataacaaacactcacaaatgttctcagtttgtatgtagatgaattgttgaacttctgttagcagcttaatgaatcctacttcgtttaatgttcagacagcagtgctctgtaggggagaatatgctcattttacagatgaggaaactgaggctcaaaaactgactttgcagcttgttcagagtcaaaccactaataatcagaagaacaggtttgtctattctgctttttctactgcaccacaactccctggtgggagaagaaggagccctctctcttaggcgagggaatgttagtgggaagaggagtcagaggaacacacttctacaccttcccacagcttctgttcattaacctgccaccttcaccaggcctctcaattcctcagggccggacttagaaaatcatgttgataggcaccttcccagtagtcctgctagcatcacagggctcatctcccagcacctccagaatcattataggatccccaagacacagtcccagtggcccccactaacaaggccccaagagagaaagcgcctcactactgagggctcaacaggaaaccagctttgaagaacactttcccctcttatatcccttctggggcctcctcctcctccctccccaggtccaagacaagttcaggaatttgcttgtctctgctcaaatgccctggttgatatctgagaaagaagaggcaggcggatcatgaggtcaggagactgagaccatcctggctaacatggtaaaaccccgtctctactaaaaaaatacaaaaaattagctgggtgtggaggcagatgcctgtagtcccagctactcgggaggctgaggcaggagaatggtgtgaacctgggagaatggcgtgaaccttgcagtgaaccgagatcgcaccactgcactccagcctgggcgacagagcgagactccgtctcaaagaaaaaagaaaagaaaagaaaatgtctccttagaaagcccatatagagtctccagctgcacctctcccttcctgggggactttgaggacataggcaagtcctgtaggcctcagtgacccacattaagcagagccgacatcatctgccgtaacaacctgcccacaaagccagggctagaggcaaagccttccttgtgagaaagtctaaataccagaaggtgtgaggcatcgttgccatgagtatgaagggcctgaggtgtctccttttccgtgtctctccccccatccttctctctcctaggagagccagtttctgagtgccccagaggagaatgctgtagtgaacacagccctgtacagagaagacagcagcttgattcctctcatttctcagtcattagcccctcactcgctctccgggaggataacggggtgtgtgcagctcctccccttctttcctgaggaaacctcagtggcttccgtgcccttgccagggtgagtgttctcctgagtccttcctctgctcctacagaatagagaaggggcttctgttgccatcagcttagtaagcctggtgcgatggatgcccctgacagggaaagccatttaggggaagacctggcactacagcccggaggtcctgggttcttttgtggttttccccgtgctcgcctctctcagatgaagcctgctgcctgttagcatgagtgtgaggagactcgctcagaccagttcactgcccgcacccactgcatcaggcagcggggaaccctcgctccagcgaagtccttgagcctcgtcatgttgggcgcgtgagggatgggctggagttccagagcagggagctgtcacagctcgtaaggggagcctcgagagtggtcgtgcaggagggctccccagtgggcctcgtggggaccctgtcagaccctctgggtgtctcagggtgacctgaggtcatcccagaatccccctggttttaagcaattgtatctctagctgtctgagggttggcaacagctgtttagtggttcttctacccctgaccatgacttacttgtctgtaaggtgtggcccctcctaagggccgtattgttttgggaggtttaagtaaaaagaagcatgtggactggtccatgacctgcttgtcctgttaacacaaaggagtccctgccacaaccttgcaccctgcatttaacctgtacctcccctaaagcacactaagccaggaaagtctagcccaaatattaatgtgtccggaaagtcttccatgacaactctagcttatactgatgctctctttctctgaaattgtacgaacgttagaacaattgataattcgtttcacaaatattgaagtattatgatggttactgctattgaaaagactgaatcaaacatgttttgtcctcgaattacttacagagatgtaagaaagatatgttctatagagcaatgactgaactggaaggtaaagcatagtaagttgcatgaaataatatgtgtgggagtttaggagagaagcagcaggagggaggcaaagacagggaaagagagaaacagagagacaggcaggagtgagagggagagtgatccttttgagatgggaaagtttcacggaaagatgagttcagcagccagcaactggcgtcaagtcttgaaatatttgggaagtggacttggaggaaaactatcgcaaaaatatcttcttcaaaagaacatatgtacagagctgttacctacccactgatttgccaatttgcaaagcatttacaattaccaatttcatcaagataatcataccagaagatgatttcttcccactcccaagtcatgtgatcttagaattttaaggacctggatggatgcggtggctcacgcctgtaatcccagcactttgggaggccgaggtgggcggatcatgaggtcagttgttcgagaccaacctggtcaacatggtgaaaccctgtctctactaaaaatacaaaaattagccgggcgtggtggcaggcacctgtagtcccagctgctcgggaggctgaggcaggagaatcacttgaacctgggaggtggaggttgcagtgagccaagatcatcaaaatcatgccactgcactccagcctggtgatagagcaagactccatctcaaaaaaaaacaaaaaaacaaaaaacaaaaaaaaaaaactttaaggacctcttagagattaccgcatccacattctcatccatgtggcatcccctctgcagcttccccgtggcctgagcacacacagtggagacctcatttggaaggctggtcatcgagacagcctcacattggagacatcctcttgctgtagagactccagtgagatgcacgttatccacatgaaactgcgggtcagtctttagagactaccttgactcttttttttgagacagagtctcagacggagtcgcccaggctggagtgcagtggcgcaatttcagctcactgcaacctccacctcccgggttcaagcgattctcctgcctcagccacccgagtagctgggactacaggtgcccgccaccgcaccggactaattttttgtattttcagtagagacggggtttcaccatgttaaccaggatggtctcgatctcctgacctcatgatccgcccacctcggcctcccacagtgctgggatgacaggcgtgagccaccatggccggccaggatttttttgaagctccacatatttctactgtgcagctgaggttgagactcactgcagtacattttcatagagcatcagcgaggaatgaatgcccggtggatttcctaacatctttacaaagaaagaaaaacacgatgcaggaaggtagtgtgaattctccgaaacgatctcaggattttaagagtcacaaaacccatctgatagtgctttgacaattggagcagcaatgcgatcagagaccactggacacattcttggtaactggagaaaagacccaaatcacctcaggatgtcagagaaaaggcatttactggcaagccaggagatagctcatcaccagaaatggaatttggttgacaggaagtaaaatagcctgggagagctgctgtctactcccagaacccacccaaggctcttctgtggatagcaactaccgcagcgtgcaaggcaagggactttgaaatttacaagtcgtagccactgagagggtgggaataattcgatcattcataaaaagtatattaataatcattaaaaaaataatataggtaatatgttaacatttaaaatctccaatgaaaaacactaaaacccattatattactaccactctttgaaaaccactgcaatagctcagagtttccttctgtttattatatgtgtatgtggtaacagtgagatcatattttaagtatacagttttgtctttccttttacttactgaatatcttaccacaagaatttgcttgattttaaagtcatttctgttaatgtgaattttttacaattattttttctagtttattatggtatatataagaaaacaacatattatcgtatattatttttatatttactttttatcttgaaattttcctatactttcatatttttaagagttttccagctgggctcggtggctcacacgtgtaatcccagcactttgggaggccgaggcgggcggatcacatgaggtcaggagttcgagaccagcctggtcaacatggtgaaaccctatctctactaaaaatacaaaaattagccagacgtggtggcgggtgcctgtagtcccagctactcgggaggatgaggcaggagaattgcttgaacctgggaggtggaggttgcagtgagccaagatcatgccactgcactccagcctgggtgacaaaagcgaaactccaactcaaaaaaaaaaaaaagaaaagaaaaaccaacaactgttttattgctttctaatatatggtcttttaatttcttgcattggctaaagctttcagaacaatgttaaataataattgataatgaatttacttgtctcattagtgacttgactgagaatgcttttaatgtttttctattaaacatgatgctgtctttggagtttagttcgttttattttattttttatttacttatttttaaattattattattattattattattattattattattattattatttgagacccaggctggagtgaaggggcacgatcttggctcactacaacctccacctcctaggtttaagcaattctcatgtttcagccgcataccaagtagctgggattacaggcgagcaccatcacgcctggctaatttttgtatttttgatagagatggggtttcaccatgctggccaggctgttgtcaaactcttgagctcaagtgatccacctgcctcagcctcccaacgtgctgggattacagatgtgagccactgcacctggcctacttagttttattttaacatgttaggtaagtacctaactattcctattttattataagatttcagaaatcaaaatgaacatttaatataatcaaatgcctttttagcatctatggaaaggatcacataatctccctttacatctgttaatatcataaaacatattaatacattttctcattttgaactaacctggcattcctgaccaaatcccaaatacttatggttaattattttggtaaaattactgaaataaatttgttaatcttttatgatttcatattttctttactttaacataaatttttttcttttcttttgagctagttatgcacacttcgcaaaaaaaaaatggaagctttcttcttttatattcttgaatagtttgatcgtcattacaaacttccctgtggcattttacggagatgttgcttttcattagtggcaattggaagctagctctttctctactttttctatagtagtctgtttagattttctaactgttctagaattattttaataaatcataacttcatagaaaacttttataacttggagttcagaaaaatagaattttataatttttattgaaatataatagttgtatatatttagggagtacactgtgatgtgtgtatatatatataaaacaatgtgtaaggatcaaatcagggtaatttggatatccatcacctcaaacatttgtctttgtgttggggacattccaattcttctggctattttgaaatatacaataaattattgttaactatagtctccatactctatcaaattctagaacttgttccttttatttaactgtatttttgtacccattaaccaatttatctttatcactccttcccctcacccttcccagcctccaatcaccaccattctattctctactagaatttttcaattttctattgggctatgtttattttctccctgtcaattattattttgcatgcttatacttttttgcttttactcacgattagatcacttagttaaggtttgtcaatttcattttaccacaaacaacctgttctcaatttgtattcattcttttgtttgtctattttctaattttttactatggaattcctttagattttcttaaatttcttttgttttcttattctaaattcatgattgggttaagccttttcatttcaacatttttgctgattaacatgaacatatcttttgacttacaattgtaagacaactaaggaagtcagcatacctacaccatctctacatgttctttcttctcctcttaactttattagatttctacagtgtcattgttcaaacatttatattttattctgaaaccacaatccccatatacgtcttacagtaaaaaaaattcagtgcttattaccagttattttgttttctttttccttcctcttctctttgttggctgaagtttatcctctagaagtttattctatggggctcatagaacaactattcttgagtttttgagtgtccaaaaactttaggctgttgcttgtatatttgagttacagtttgtcttaatagaaaattctttggttacattttccttctatgaagattttataggaagttttctattttcttctagtcttgaatacttctgtagagaaatttaagataagcatcttctcattctattgtaagtgacttgatttctgccaatatacccaaaggattcattattttttaattacaatgaccttactaggactatctcagaatgggacctgtttctgtctcctggtacatgttgtgacttttcagtctctagaagccggtcttcagttatttctggaaagttttattttgtctaattgtttgttcctccatgctcattttttacctgagttctgttatctcacatttcacttccatctggtatcttgaaactcttccctgaggtcttgtatctctgtcttgtgttcttgtcacatagaggtgaatggtttattacatgttttaagttcacacttgttttttgtttttcagttattcagtagctctatgccacaatttttcttctgagtgtttgtagtctagcatttgtttgtcctagtttctctcctctaccctccccatttttttcttgagtatctttaactagaccttgtgctggttcccttttgaagtctaaatgaatcgaaaggtttctcagccagtttttcatgagaggtttttgctggggacaggtgcatgtcttgattcacggttgtttttgagtaccttttgccttgacttctctaatgtcaatgctgacacacagctgaggaactgctgacaaggcagttttcttgcttttacagtctcacctaaacactacacaatcagcttgcctgggtggcttctcattcagtcctgtctcctctgcttctcagatccaaactgagaccaaagaagaccatgccaccaaccatttccacttttataaacaaaggattttaaagaatattttggtgaccatcccccaaagcagtcacatcaaccatactactacagcactctgatttctgagatatgattttcttaaccgctcctggccctgaatttcactgccccagttcaggcaatcatcatgcttccctttctgttagagttatcagactccaaccccttcccatcttctgatttcagatacaagggtatgatattgctcttaaggaagctcaagccctacttgtctctagtcaataaagacattgatatttttttgattcagagtttgacataattcagtatggctttccaagtacatgccttcttcatttgaagacatagccttagagtcattggtcaatctaccatgcctgaatgaaggacaagtagaagaccagtgtctgtgcaatgtagaaccctaactgcacctggcagcaaccaacccacaggacatgattacaactttggttttagaggggagtagctgacaatgtacacagaaaaaataattttaaattaacttgttagtcaaagtccagtgtaaggatttaagtaacaataataacactagcaattaattgaacaaggagtgttgaattgacacttcatagtgtggtccctctctttgaagaaatgtgctgggctggtctttctgacattcagaatcatgagtatcttctctctgattcctggcataccttcacttgatcttcactatttccagaagccttgaaacctaggcaacagtttcaatattttctagtttctctgaaactctcatgaatttttctattttgaagtctgcttattggtctctgattctatgacattgactttttagattccacatgtaagtgaaattgtcaaatatttatctttctgtgtctagtttatttcacttagcataatgtcatccagtttgtataaaaggatatattttaacattctcaccacaaaaatgagttgttgaagggatggctatgttaattaccttgatttaatcattttacaaagcatatgccaatcaatatcacactgtaccccataaatatacacaattattattcatcaattaaaaataaattattaaaatgtaatctgcttattagtttgggttgatccctcagagaaaaatgggaaaattctatcttttttttttttttttttttttgagacggagtctcactctgtcgcccaggctggagtgcagtggcgcgatctcggctcactgcaagctccacctcctgggttcacaccattctcccgcctcagcctcccaggttcacgccattctcctgcctcagcctcccgagtagctgggactacaggcgcctgccaccaagcccggctgattttttttgtatttttagtagagacggggtttcgctgtgttagccaggatggtctcaatctcctgacctcgtgatccgcctgccttggcctcccaaagtgctgggattacaggcatgagccactgcgcccggggaaaattctatcttaatctcactatattcaaaaaggaagtcttttgccttttttttaacaaattttattgcgtatatttaaggttcaccacatgaagttacgagatacacgtagacagtaaaatgattagtatagtgaaacaaattaacatatccatcatctcacacagttacccattttcccccttccggcaagagcaactataatctactcatttagcaaaaatcttgaatacaatacactttattaactataatcctcatgttataaattagatcttttatcttagcttattttcccaagtattctgaccttttcagctagcagaggatgagagggacaaggtggtggtggcattcggcatctcaaccaagagcaaggtaaaggcattgaggtgttggaggagtgagggatggcctggggactcgccacggggctttgaacataaatggtttaaaatgttaatgtgaactgagtgaactgatacctcccctgctgggacatgtccttacagaaactcatggagccagaagctgggaccaataggaccgctgttgctgagttcattctactgggcctagtgcaaacagaagagatgcagccagttgtctttgtgctcctcctctttgcctatctggtcacaactgggggcaacctcagcatcctggcagccgtcttggtggagcccaaactccacgcccccatgtacttcttcctggggaacctgtcagtgctggatgtcggatgtatcactgtcactgttcctgcaatgttgggtcgtctcttgtcccacaagtccacaatttcctatgacgcctgcctctcccagctcttcttcttccaccttctggctgggatggactgcttcctgctgaccgccatggcctatgaccgactcctggccatctgccagcccctcacctacagcacccgcatgagtcagacagtccagaggatgttggtggctgcgtcctgggcttgtgccttcaccaacgcactgacccacactgtggccatgtccacgctcaacttctgtggccccaatgaggtcaatcacttctactgtgacctcccacagctcttccagctctcctgctccagcacccaactcaatgagctgctgctctttgtagcagcagccttcatggctgtggcacccttggtcttcatcagtgtgtcctatgcccatgtggtagctgctgtgctgcaaatccgctctgctgagggcagaaagaaggccttctccacatgtggctcccacctcactgtggtgggcatcttctatgggacaggtgtcttcagctacatgaggctgggttcagtggaatcttcagacaaggataagggggttggggttttcatgactgtgatcaaccccatgctgaacccacttatctacagcctcagaaatactgatgttcagggcgctctgtgtcagctacttgtggggaagcgatcactgacctgagagatgacctcctttcctgccttttctggaccgaggaaaatttcccgagaagatagtaaccaacaaaccttgtttataaccattatttctatctcctgatgcctgaggagtggtgttatgtgtttggcctacaaggaaaccctatataattcattcatttattcattcaacaaatatttattaaattacttctatgatccaaacaatcttctagggcattggtgagcaaaatggacaaaagtctctgcactcaagcaaatcacatgctataaaggtaggctaaataaataaataagcatcatatatagtataccacatggtgatacactctatagaaaaaagctggtaagacaggaagacatgaagtgagcttctgccaaccaggcctcctgggcaagttggtaccttgctttgggctgtgcccgctttctcggtagagctgaaatcttggcagcactttatgcctgagcagcaatgtcctacaggaaagggccacttcatcccagcctaggtaaccaagaatatcactgcaaagtttccttccagagggatgtgagactccctccagatcagagtgtggaaaggtattttgaaccgtgggcccagtgccaggaatcatttcatgctactgttcacctttcacctcccataaaatcagttccctcgctttaataccacacgggaatcccataggacgatcaggcaacaggtggggtctagagaaggaaagagctactaaataaaaactatgttaatacataagtgatataccttaagatcaaaaagggaatgtcctatttccatcccctgcggtatctttctgtcttatttgataaatcatcttcctgacacatatgatactttttgaaacagtaagcgtttatgttccaactaggtcctcagaattttattgtagaatacccaatacaacattctcctccaaagtcttacttttctatcccaaaccttctagcctgaaaatacacacccataaatgcagtccctgggagtgacacctccttctaactttaactttatttgattaatacatcaatactgctgcaacccagagcatttcctcatcttgatgtctatccaggtttcagcccattaattcctgattctctccagcccctctaggaagactgtttactgcgtcctagcaacactactgtccctctgctgttcatccctaaaactgtccatgggtgcacctgaaccttggcttctctgtgatttcctcttggggttgactggaaggatgggctgagataaggttgtgaagacaagatgtgagagtgggaggtaggaacggattggagcggagcaatgaagatgaaatgagcatatcgagagggatgggacagggtgatgagcaaaagtggtaagaaggaaggatggaagtaatgaaggaaatgatgcaatgagagaatgggaagagagaagtatgtctcttacctgatgctcttgggtgtccagacactttaacgttaaagaacttgagcttcccttaagggcaaagttcttgtgaatgaaaatcacggacacgggttgtaatcacatcattcctactcatccactgctctgtgatcttagaaagttccttaccatggttgggcttgtgtccacctgtaccataagggactgggacaagattttctatccacggttcctcacatttaatgacctctgatcataatagtctgaatgagctcttccctgggtctgaacacatcacaaacattttgagagcattaccaccaccatttccaccactccatctacgccgtgagcatctaacgcttgtctatgacccccaaagatcccaggccctggcactgcctcctgtgtggcattgccacctcctttcctgtgttccacctgtcctccaacactgaggggtttcctgaacaagtgagaaagatgtacttccttgggagtttctctctttgtgctctcaaatataaatatacctatttttaaatgtttcagaaatattatacctgatagtggaaacattcagaaaatattattctttcaaatgggaaataaaaatccaattattccttcacctcgccaaaaacctcatcagagttaactcctcttaagaatttgatgaccaggcatggtggctcacgcctgtcatcccagtgctttgggaggccaaggcaggtagatcacctgaggtcaggagttcgagaccatgctggccaacatggtgaaaccccatctctactaaaaatacaaaaattagccgggcatgatggcgggcacctgtaatcccagctagttgggaggctgaggcaggagaatcgcttgaacccagaaggcagaagttgcagtgagctgagatagcgccactgcactcccgcctacactccagcctgggcaacaagagcgaaatgccatctcaaaaaaagaaaaaaaaaaaaaaaaagaacttggtgtttaatcctccaaagatttcctatatatatgatatgcctacttcacatctgtagaaacatactgttctgtgatctgctttatgattttccctacatgttatacaatataatcttttacatgataaagactaaaattctgctttatctcttttaatgatgacacagtatatcattaaacatataaactataatttatttaatcaaaactccactgatataacttgggttgtttctaattgttttgcaataacaaataatattgtgatgaatatccttacggggcatttttctaaatttatgtaattatttccccaggattaattcacatgaataactttatcagattataaaatataaataacaaatataaattttaagatacacatgcacaaacacatacacatcttaatttctaaaacttttgggccaatttacagatttgctgttgtgatagtgtttgtttacccacatccctcccatcaatggttgttattaaaaaatttttttctcgatttttataacctgaaggttgagaaattgcagtattttaatttgaatttttaatttcttttttcattaattttagttttatttatttatttaagtaggtgccatgtattgagtacttaccaggtgctagtaaatgctctatccacattacataagagaattcatttaatccttaaagtcactgtttgagctatcatccctattttaccaacaaattgagggataaaactttgtatcaaccaaatatctcagtaattgctgatcagagctgattaacaaatgataatcaacatgttctatatttggtatttcctttaccttacagggcattctttttttaacttttaagttcaggagtacatgtgcaggtttgttatatatgggtaatataggttatatatacctatataggtatatataggtaatataagttatataggtaaacttgtgtcatgagagtttgttgtacagattattttgccactcacatattaaacctagtacccattagttatttttcctgatcctccccctcctcccaaccttcactctctgataggccccagtgagcgttgttcccctctatgtgtccatgtgttctcatcacttagctcccacttataagtgagaacatgcagtatttggttttctgttccgagttagtttgctaaggataacggcctccaagctccatccatgttcctgcaaaggacatgatctcattcttttttatggctgcatagtatttcgtggtgtacatgtaacatattttctttatccattttaccattgatgagcatttaggctgataccatgtctttgcttttgtgaatagtgttgcagtgaacataagcgtgcatgtgtctttatgatagaactatttatattacattgagtatataccctgtaatggaactgccgagttgagtgatatttctgtttttaggtctttaaggaattggcacactgtcttccacaatggtggaactaatttatgctcccatcaacagtgtataagcattccttttactccacaacatcgccaacatctgttattttttgactttttaatgatagccattctgactggagtgagagtatctcactgtatcttcaaatccttgatagttgcactaatctctgcaatcccttcagggatgcgatattgttttctatttactatttttctaggtagaggcagctctaatggcttccatttggcctttcccaccataatagccctcaccctaccagtcaaggagtcaatgtgagggtcctgacactgctacgtatgtctatgccaattatgcattctggcactggggaaatgaccacgggatgagtacagggactcactgtaagttggacctgagctaaaactccattaattacctgacctccataagcccctactttaactggaggaccacagtgacgtttcggatcccctggaatcaatgtcagctcagaaccagtgtctagtagtccctgaaagatctgattattcccctttccccaatgcacagttaccctggtaaaaggctagaggtctccttagggaagaatgggagaaagattaacagcatgaattgtcagtagtgtagtgaggtccttccccaaggggaccccacctccccttcattcaaagggttctgggtctgtaaactggttcaagtctggaaactgattgaggggccatgattctctgtttttatatatcaaattagtattttgtccactggacctggaagttttttgcttatataaatcaagtaagaatgcagtaggcttcctgtcagtttcacttctaggaacaccatgattaattagccaatgccagagctctacacaagtcagactattctgattgctgttttgcctctgctgtccattatggtggctacagccaacttgtctttaatggttgagtgctgccacttggcccctgccacctcgggatccaattattcccactgcatttaaattttatagttgagtgactgcagttcccactgtaagatctgacatacagagaggagcaatcatagagctctttgaggatgcaggtgctgccctcacaaatctatttcacaaagtattaatcaagggtatatcttctgggccctcccagctgggatgagtaggtctaaagtgactaatccactccagcatccctatctccctaagcctttggattccttcctctacattaaaccaaagaagatcaggcatttccagctcgctcacagtgggccatcttttaatccatatttcagctaaccaagcaaataagctagtagaatcttttttaacttcccaagcagcaacattaaatgcagaatccctgcttagtgggcccaaagcaataaattcagccagatacaactttatgttccttccaccattatcccacacccttaatatccattcccgtgcctgttctttagatttctgctcatttaaattagaaaactcaagcagttcttttggattgtagcacacttcttcatgggtcacactctgaacctcacatctaggggcctgctgggactttagtctagttataggtctagaagcaaacaggggtgttgggggtgggccctgaggagaataaacattgcatagccactgcctcagagaaggccattgctgttgccttgggcagtgcagggttattctcctcaatctccatacatgcagtcagcaaacatacgaaaaaactcaacatcactgatcattagagaaatgcaaatcaaaaccacaataagataacatctcatgccagtcacaatggcaattattaaaaagtcaagaaacaatgatgctggtgaagctgcagagaaataggaacacttttacactgttggtgggaatgtaattagttcaatcattgtagaagacagtgtagcaattcctcaaagacctagaaccagaaataccatttgccccagtaatctcactactgggtatatacccaaaataatataaatcattctgttataaaggtacatgcacatatatgtccactgcaacactattcacaatagcaaagacatggaatcaacccaaaagcccatcaataatacactggattaaaaaaaatatggtacatatacaccatggaatactatgcagccataaaaaggaatgagatctttatttaatttatggtcttttttttgagacagtgtctcactctgtcacccaggctggagtgcaatggcacgatctaagctcactgcaacctccacctcctgggttcaagttattctcctgcctcagcctccatagtagctgggattacaggcacccgccatcatgcctggctaagttttgtagttttgtagagatggggtttcaacatgttggccaggctggtctcgaactcctgacctcaggtgatctgcccgccttggcctcccaaagctgaaattacaggcgtgagccactggtgatcatgtcctttgcagggacatggatgaggccagaagccattatcctcagcaaactaatgcaggaatagaaaacaaaacaccatatgttctcacttataagtgagagctgaacaatgtgaacacatagacacagagagggatacaacatactggggcttgttggggtgggggggcagtaggagggagagcattaggaaaaatagctaatgcttgctgggcttaatacctaggtgatgggttgataggtgcagcaaatcaccatggcacacatttacctgtgtaacaaacctgtacatcctgcacatttgccctgtaacttaaaataaaataaaaatagaaacacaaaattccaaaacctatagaatacagcaaaagcaatattaagagggaaatttatggtaacaaactcctacataagaaatatttccaataaacaacctagcaatatacctcaaggaactagaaaagtgagaacaaatcaaacctgaaagtagtagaaggaaagaaataataataaagatcaaagcagaaagaaataaaattgagactaaaaatgtgaaatattaataaaatgaaaagttgattttcctgaaaagtttaacaaaattggcaaaccattagctaaactaattaagaagagagaaaacccaaataaataaaatcagaaatgaaaaaggagacattataagtgataccacagaaacacaaaggatcattagaaaatattatgaacaaccatataccaacaaattagaaaacctagaggaaacagataaattcctgaagataaactgcctataaagattgaaccaagaagaaaaaacaaacctgaacagaccaataatgagtaataagattgaatctgtaagtaaacatctgccaacaacaacaacaacaaaaaagtccaggatcaaatggtttcactgctgaattgttcaaaactttagagaaaaaaaacccttaatacaatttcttttcaagctgtttcaaaaaacagaagaggaggaaactcttccaaacacattctataaggatagcattaccctgatactaaaacaagacgaaaaaacaaaaatagaaaactaaaggccaatatccctgatgaacatagatgcaaaaattcttcacaaaatactagcaaacaaaatccaacagcacatcaaaaagattatgcactatgttcaagtggattcaagtggatttatctcaagaatgcaaagatggctcaacatatggaaatcaacatatgagatacatcacattaacagaatgaaggacaaaacccatatgatcatctcaatagacacagaaaaagcatttgataaaattcaacatcactttatgaaaaaaattctcaataaattaggtatagaagaaatgtacctaaacacaataaagaccaaatatggcaaacccacagctaatatcatgttgaacggagaaaagctgaaagctttttctctaagaactggaataagacaaggatgtgtactcttgctaatcttattaaatatgctactggaaatcctatcaagagcagttagacaagagaaaaaatagacagcatctaaaccaaaaagaaggaagtcaaattgtcctttgcagataaatagtcctatctatagaaaagcctaagaatcccaccaaaatgtcttagatttaaattaaattaagcaaattcagtaaagttgcagaatacaaaatcaacatacaaaaattagtagcattcctatacaccaaaaacaaagtagctgaaaataaatcaagaaagcaatcccactacctaggaaaaaaatctaaccaatctctataaggaaaattatatgaaagaaaatgaagaggataaaaaaaaaaaaggaaaaacattccatgttcatggattggaagaaataatattgttaaaatgaccatactacccaaagcaatctaccaattccatgtaattcctatcaaatagaaatgatattctttcatgaaatagaaaaaaaaaatcctgaaatttatatggaaccacgaaacaccccaaatagccaaaccaatcctgagcaaaaagaaaaaaactcactgtatcacactacgtgacttcaaactacactacacaactatagtaatcaaaacagcacggtacaggtataataacagacagaccaatggaacacaatagagaatccagaaataaatccatgtatttacagccaaccaattttcaacaaaaacaccaagaacatacactgggaaagtcagtctcttcaataaattgtgctgtgaaaactgaatatctacatgcagaagaataaaactaggcccctacctctcaccatatacaaatattaactcaaaattgattaaagacttaaatgtaatacccaacactatgcaactactagaagacaacatagggaaaatgtttcagcaacttactctgggcaaatattttatggataatacctcaaaagcacagccaacaaaagaaaaaatagacaacttggattatatcaaactaaaaagcttctgcacagcaagaaaaccatcaacaggatgaacagaaaacctgtagaatgggagaaaatctttgcaagctattcatttggtaaggttttaatatccaaaatgtacaaggaattcaactcaacagcaaataataataataataatctaagttaaaaaatgggcaaaggatctgaataaacatttctcaaaaaaagacatacaaatgaacaacgtgtgtgaaaaaatgcccaatatcactaattatcagggaaattcaaatcaaaaccaaaatgagacctcatctcaccccaattaatgtgagtattatcaagaaaactaaaaataacaaatgctggcaaagatatggagaaggataattcttatatattgttgttggtgggaatgtaaattagtacagctattatggaacatggtatggaagttctcataaaagctaaaaatagaactaccaattgatctagcaatcccattactaggtgtgtatgcaaaagaaagaaaataggtatgtccaagagacattttcactcctagcactatttatgttagccaagatatggaatcaacctaagtggccaatcaacagatgaataatgaaaatatggtgtatatatacacaatggaatactactcagtcagtaaaaagtataaaatcttgtcattcatggcaacatggatgagcctgaaggatattttgataaataagtcaggcacagaaaaataaataccacatattctcattcgtgtgtggaagcttaaaaagttggcagtatagaagtatagagtagaatattggctgctagaggctgagaaggggaagaagtggggttatagaggttagttaatagataaaaaattataggataggaggaataagttctagtgttctatagcgctgtaggatgactctggtaaacaatttattgcatttttcaaataactagaagagagaattttgaatgttctcaatactaagaaatgataaattttgaggtgatagaaatgctgattttcctgatttgatcattgtacattgtatatatgtatcaaaatatcacactgtacccaataaatatgtacattatgtgtcaatttttaaaacaatttcaaaataactaatataaatgaatgagtgaacaaatgagtgaggttcttaagcagactttggttcccttccccatgcttgagaagtccttttagggccttaggtatgacttagttcttagatatagataaactaaagtatggtatgtaagcaaatagaaagttcattttaggtttgggtcaggtaaaaagacatgcagacataaaaattaagaaaagttcaaccattgtggaagtcagtgtggcgattcctcagggatctagaactagaaataccacttgacccagccatcccattactgggtatatacccaaaggactataaatcatgctgctgtaaagacacatgcacatgtatgtttattgcagcactattcatgatagcaaagacttggaaccaacccaaatgtccaacaatgattgactggattaagaaaatgtggcacatatacaccatggaatactttgcagctgtaaaaaatgatgagttcatgtcccttgtagggacatggatgaaactggaaatcatcattctcagtaaactatcgcaaggacaaaaaaccaaacaccgcatattctcactcataggtgggaattgaacaatgagaacacatggacacaggaaggggaacatcacactctggggactgttgtggggtggggggaggggggagggatagctttaggagatatacctaatgctaaatgacgagttaatgggtgcagcacaccagcatggcacatgtatacatatgtaactaacctgcacattgtgcacatgtaccctaaaacttaaagtataataataataaaatttaaaaaagaaagaaaacaaagttaggagacaggctgatgtgaacacttgctcaggaaaatgagtaaaaaaaatttattcaaaatttgtagttttgtttagcaaagaaggggactgagatgtctgggtcttattattgacatgagaggacagaatatcatttaaagcagacctacagggttttttcaagtacacatgataaactggtggtttaacaatgaagacggaaattttaatttaaatattttaaatctttaatttaaagattttcttcacctgggattagcaaaaaggaaaatcttcctagcaggttactgagaacaccttacttcaactacatatcccccccacatctgttttacttactcagaaattatgtaatattacatttaaacaaaaagtttcatgtgcagaaaaaaagagatctgaaataatattgaaatattaatgtccatgtatctattagataaaattatataagactcccaagtattactgtcatagaaggaagggatttttccttttacaaatgaccctttccagggctcccttcatgtctctgttcctcaggctgtagatgaagggggtcagcataggggtcaccacagtgtacatcatagccatgacagtgtcctttagagtagaactattagctgatgggcataagtagagaccaataacggtcccatagaacagtgacaccacagagaggtgggagccacaagtagagaaggccttgcagatacccttagaagaagggaccttgaggatggaggagacaattcttgcataggacccaaggatgagtaggaatgggatgacaagaatgagccctcccatgataaatatcacccattcattaactcgagtgtcagagcaggccagcttcagcagagcagacatatcacagaaaaagtgggggatcacattgtctgcacaaaaacacaacctggccatgagtaaagtgtgtaacatggcatggaaggtggtcagcacccaggacagcgccaccacggagagacagagcatggggctcatgatggcggtgtagtgcaggaggaagcagatggcggtgtagtgcatggggaagcagatggccacatagcggtcataggccatggccacaaggaggaagctctctagatccgaaaaatacaagaagaagtacatttgggtcaggcagtctgcataggggatggatgggtcttggttctgcatgttctgcagcaatttgggcattgtgactgaggaaaagcagaggtcagagaaggacaagttgctgagaaacaaatacacaggcgtgtggagatgggagtccagtcgaatgaggacaatgatgaggaggttccccaggagggtggtaagatacatggccaagaacagggcatagcacaggttttgctgctctggttggatgggcaggcccaggagcaggaagtctgagatgctggtttgattttgtcccatcatgctctgtctccagtatctttaagagaatataatagggtccctcaaaaccgtgaataaaaataaatatattcctatgatacatggtcaacaggtgttcaatcactgatttcaccctcattttccctaacaacaatctctatattcagagatttctataattatttctataatcagaaatgtgccacatcacaaaatccacgctacttttcacactgatccatctcactttgcataacatgtagcaagattgactcctcctttctttctaaaacactcttatctattagcttccgtgcaatcacactggtttcctgacacatattggccattccttcttaacaactgtaaatggtttcttctctaacagtatcttatacgttgctgttttctgggaatttttcctaaattctgttctaattctacagatcaagccctgaaagagttcacctgtccccgtgacactgattaccatctgaacttcctgggtaaacctatcatcattagtactgcattagcagttgcttcctgattatctccctatggatcatgaccatcctcagcttaacagatcccagatgaaactcgttatctcaccctgccactcttccaatttgctcctccagtctctcatatctcagtaaaaggaatccaggctcaagtcagaaacctgggagttttctttcatttatttatttctctcaagatcaacatctaatcctagcaagttatatagattctgtacttcattctatttctaattcacccactgcttatcccagttgccacaatctggaacaggctgacatcttttcttgtctggactattggaatagtctcttacttcatctccctgctgctatgctcactagccttcaatccattcacactgtggcgttctttttttttttttttttttttttttgagatggagtctcgctctgtcacccaggctggagtgcagtggcgcaatctcagctcactgcaagctcctcctgctgggttcacgccattctcctgcctcagcctcccgagtagctgggactacaggcacccgccatcgcgcccggctaattttttgtatttttagtagagacggggtttcaccgtgttagccaggatgttcttgatctcctgacgtcgtgatctgcccgcctcagcctcccaaagtgctgggattacaggcctgagccaccgtgcccggccacacactgtggcattctaagataaaaatctgatcatcattctcctgctcagagtccttatggattctcattattcttaacatatacacaaaattcctttcaaggacacaaatcatatttcattatctgacccatgcctacctccacagcctcatctggtcccacaatgactcttgcatcagcattctccagcattctccagcaatgctagacttagaagtcataatttcttgcctccagacgttcacacttgctgttccttctgtgtaacatcttacctctgcttttttttttttttttttttttttttttttttttttttgagacagtctcgctcagccatccaggctggagtgcagtggcacgatcttggctcactgcaagctctgtctcccagcttcacgccattctcctgcctcagcctcccgagtagctgggactccaggcacccgccactacaccaggctaatttttttgtatttttagtagagatggggtttcaccatgttagccaggatggtctcgatctcctaacctcatgatccgcctgcctcagcctcccaaagtgctgggattacaggcgtaagccaccacgcccggcccctctgccttctcttacttggcatacccctgcttctcctgcaggtttactacatgtcactggctcagctcaatcactcagaccaggtgagacctgcttctaagtttccacagcatcttgtactcatccagcagcattcaatgaccttgattgcttgtttatagctgagtttcctaccaaattgtaaactccatacagataaggccatgactgccttcgtgactgcaccaaggccagcaactgggatggtgcctggatatggccaatgtttcattagtatttgttggctgtccttcaggctgagacatacactcctccaactttattttttatttattttgagacagagtttcactcttgttgctcagcatggagtgcaatggcacgatctcagctcaccgcaacctccgcctcccaggttcaagcaattctcctgcctcagcctcatgagtagctgggctcacaggcaaatgccaccacacccagctaatttttgtatttttagtagagacggggtttctctatgttggtcaggctggtcttggactcctgacctcaggtgatccacccgcctcggcctcccaaagtgctggggttacaggcgttagccgccgcgcccggcccctccaactttaaagcagccaacacccattgtagtttaacgactcctattaaatcctcccagaataagaattcactagccttaaccatttagtgctagttttgacactttattacaaaattctgagataaacttcagacctatggaaaatgttagaccatccaaccaccctactctttattttaaaaagacagcccattatgcatgttgacactgtcattttggttttggtgttgatgtctacatggttcagttatgttgacatgaagaattgtatctgaaagtttctataatttggggagaaagggaacgaggatatccacccttgagacctcgctgtacttcctctccagatatccatacctcaaaatgcctctgagctaagaaagctgaagggtgttagggtacatgagaagttccttccctagagggatgtagctgagtctgtcgggatcttcaccctgctagtgatgtttagtctagccacgttaacagtttttcacatttgaatataatctgctagtattgtagtagggaaatggcatcaagtgaagtttcacatgcctgttctctcagaagtttgcctacctgggaaatgagtgggaccaatctctggtgtcaagggtcttattagaaattccaaaccagagagacatcacttgtgaatgctgccactgatcgggaatataaatttcagctgctccctcaataatgcctctcatcttcttcacctggtaaatctacagttctcagtctggactgaatataagaatcacaaaggtcactgcttctaaaactttaatttacatacaaaccacctggtggtcttgttaaatgctgattttgattcaataggtctggtgtagggcctaatattctacattccgaaagttaaaatttcacatttggtgatgccaattctgctgttctgtggaccacactgagtagtaaggacatataatacattttaaaaatacagattacggcaccatcccccaataaatgtaattagaatctctggagggggccttaagtaagctccttaagtaattcaaatatatggccgagggcttgaaatctctgtattaaatgcctatctcatagagatgtcattatgttgaaatgatacaatcatgagagaggacattgcatagtattaatggacactgtcattaataaaaagatattaagttgtgaacattaaatcaaaatatttctggaatgtagaaaagtcttgaaaagcagagaggtggagaaaaggaaagttatatctgaaaaactatcctatagaacatcatacaactggggaaatcaagaccctcaggttgtagggatgctaagctaccagcttattcaccctcctgcccaacttactctgtgtctgaggttaactccagggccctgatccaaaatcctcctcccctttattggttgcaacagcctttgtagtcatcacctgtgtctgtactcacccttctgacatctctctttctacctatccctggccctaccggactatgcatcccggagaagcctagatcctggaggaactcattaaaaacaaagtaattacacaggacgtctctagaacaaattatcttagagtcctgcaacagtgactgattacagctgttgatcacaccttactatactttgggggatcgggggatcatgagaatggagagaagctcagggatgggtgtttaatcattgcctgcttagggaatggagagcatgcctgtgaggttggggcctacatcttgagaagtgaagaaaaatggttggagaagtcacagaagcaagcagggaccagactgtaaatgtcctaaaacatcttaagagtctaagagtttaggctttatcctgtggacaacaacaagccatcagtggtctttgaatagaggaccaccagggaaagacatatgctttggaaatatttccaggtggcagaatctcttactataacccaactccctgtaaataggccctaggagagagaaaaatggtaaccaacaaggatcagacttccattatccaaccatatacagatataaaggacaggaataagagaaaagatgaactctcccggatcacattcaattcttcctcaggcaaatatggaaaagtaaatccatatttgcagccctctgagttacttctagctccttacctctctaggaaaaccttaataaccagacaccatcattatctcaaccactcttcacgtgtcatattacctcctactagcttttccttaccctacaactgatcacaagaccacaactgacatttacaactccttcttccacacccattccatgttcccttttacataacttcagctagattcaacccacattccttttgagtctgaatcctcagtgttattgtttttcttgggttgctataatagtgttccattaacttttactaagtgacatacagaagaatcccctgcatgtcagatatggtcttccctttcctcattatgcagagaaacacaattttccattgttaactgggattgaagtaccacaggcagtacagtaaaccccttctttgcctactgatttgaaaacataaagaaccaaaattgccaaatggcagtctcaactttcagtagactagaaccatggaagcacttccggtaaaacattaagaattgtatcagacacttcttccttaagaattgtatcagacacttcttgtccaccacttcaaattctctcagccatcttctcttattccagccatggttgcaataaccaattctgtgcagcctttgaccagcttcacatagattcggtctgacagttttactcaggcctattccatctgcttcttgtgtcctgccatatggttcctctgattccatggagtagaatatcatggaaaaccagcccaatgctcatacatacacaaccagaaagtgcaagggagttgttgccgtgttggtcaacccttaaatacaggtattgggagcttatgcatatatgccttagtccctcctagtggctgccaactcaataagtcatcctagtaactggtctctcttcttccctatttaacaccccctctattccttacttcttcacatgaggtaaaattctcaaataaactacttacaaataagactttttctcagtctccactttttgggtaacctaggctatgacagaaagtaagatctgttaatcaacagagcccaaaattgtgggggtagggagcaaaagttctgtgggtatgttagttggtctaataatgaggaagtcagccctactaccactccttgatttccagacttgtgaatcatggctatgagagaaacatgatgatacatgggctcctggttcaaagcacaccaacctttctggcacccctaatttttgttactttgtgaactgctctgtctctagcatttgcaacaatgcctggcacaaagcagattttcattaaatatttgaagtaattaaatgaaccgcacagactagcagttccagaacaatgcttaataacagtagtgacagtgggtacacttgtctttttcctgatagtgcaaatacctgtagtatttcccccttaagcccaatgctggcttttgagctaactcagatgtattattatcccatattaaataagcatcatctattcctgttacagtgagcatttttatctaggatggttgtggaattttagcaaatataccattttaataaaaacattaaaattatacttcaaaaactctttccacatttaaaagaattcaaatactttaattcaacaagtgaaatacaatagtagctataaaactatggagatggtaaattaagcaataacagaaaactgctataatttatgctaaacttccttttatcactacttaagtttcattcatcacattaatataatactgcatctcaacatctgcaattttgacaaatgcctggaaagttttttgttcagaaacagacgccggtctgacagaaacacattggaaaatgttctttttctggtcatagttgccaacacatctatgaactcggcctctaatcagtctcggaagttcacgatcctgtttttcaaaaaataagtatcaaaaaatagttattacttcatctgaatttcaattttttaaatatttatgtgatcaactaaacatgtgccacctcaaaatgctataattccttcacgtgagtcagggccccactgctaacaagacaatgatagttattcacatattggtaccctgtaacagaggaaagaccctcacttggtagggctcttacaagctagcaagttgttgcttcatcaaagactgaataatccccagtgtaatgacacatgaaattacccactcttttatcagattcccagagttccactttcagtaggcagcagactgggtgactcaaaacagctcatcagatgacaattaggatagctggatgaaatgttttgttaaaaatctcctcgtaagcatcagagagatatcaagacagtgaggaattacagagaccccctcacaccccatctaggatagtatgggagtctcagatgaaacctggtttggggtgtgctttctccctgagatgtctgcaaattacagaaaagcatttgagagtctaagaaactgagcagagatttcacagacttgtataggtgggaaacaaaaaaatggaatcttaggcgtccaaggaaaagagattctagtaaccacccccactcagacctgaagcttaaggttgggacccaaaagtgtgatgcctttagagacaagtaaatcagaaaaagattagccttctccaaatcctctcaattatgaataaaattaaagcattctgaagttgctttcattaaatagtcacaaaaagcactaattataaggggaaagactaattattgataaaaggattatatgaaaatgaaaaacttctgtttatcaaaagccatcatcaagtgggaaaaagcaaaccatggatatgagaaaatatttgcaatgcacataatggacagaaaactgattcccagaatagtttttctttttaattcctagaatcagtaagaaaaagacaaataagagaagaaaacagcaagatgcctgaacagactttacaaaaaagatatctaaatagcatatgaaaaggtactcaacctcattactcactagggaattgtaaagaaatgagataacactaaatttactcatcagaattgttataataaaaaagatcgacaatactaagcgttcgtaagaatgcagagcaaccataactctcctacattgcctgtgagtacttaaattgacacaatcctttgaaaaattctttggcaatatctactgtatttgaatatacacatgctctatgacccagcaattttacttctgagtatatatcaaacagaaatacatgcaaatgcataagagacatagataagaatgttcatagaacattatgcataacagcaaaaaatccagaaacccaaatgcccaccaacagtgaaatagaaaactgtagcatattcatgcagcacaatattatacatagcaatataaatgagtgagctacagctacacacaacatagatgaatcttacaaacattttgtcaaataaaggaaatcacatatttaaaaagacataatgtatgatactatttttataaagtacaaaaacaggcagaatgaattgatgacattaaaagtcaggctagtggttacctgtaagtagaagacaagaggtagtgaatgggaagaagcacaaagggatttggggggtgatgacaatgttctgtttcttaacctggtttggcattcactttgtgatacttcacagaactgtacagttatgatttttatacttttctgtacatgttatactgcaataacaaagtttttttaaaaaacttcagactagataaaaataatacacattcaagatattataggaattgacaattatttcttgatcatcaactatgtgtcatgcactgtatattcatgtttcatcatttaatccccttaacaacctttcgaagtaggaatttgtctccccattttatattttttaaaaatctgaagttcaagtaatttaagcagctttcttaagtcataaaactagaaaatgttggagtaaatgctggaatccaagtctgatttcagaattgaggccaatgtcagaattaaggtcaaacttttacaaagtttatgtagctcttatacagcctcaatgtgtgtaggtctatagcctcctttgcaatctccacacttctatgtcaccaagcctccttatatcccagcccactatgctttcccccactttcagaaccactacccttacccctaacagttcctaactcttcactttggtaattataactactttcagttccctgaacaagtgaagctctctcttagcttcaagtctttgcatatgctgctccctcaccttagactatatccttctttccctccccaacacattttggcttagttgattcttattagtccttaaagatctaggataagttaccaccttctttgaaaatctttccctgatctgccccttccttcttacctacttctctagcaccctgcacatacctagctccaccaagccattcaccatatcacagtgtaacatttctgtaccattctacctgggattacaaactctgagagaaagagccatttgccatttacattccactttatatccctcaaacccagcacagtacctagcacgtagtaggctctctatattataaaaataaacaactttcatatcagaactaaaaccagtgttaaaagtactaaattgttaacagaatttatatttcaactgaattatagcctgcatgtttatattctgttgacataggcttcgcaaagagtactttaaaaatactcacgatttcataaaagacacaaggcagagtatttttcccatccctcataagaaaagtcttcgaataatatgggccaggtgtaacagctgaatcaagaacagctaagcaatattgaaatgggggaaaaaatgaatgttggtaaactgcaaataaaatttaacaaagagaagctgatgtttaaataactatccatatcaacctctcatagtgctatttatatagcaataaagaagacattttaagaagagaagatatttctcaggcagttttataggtaggaaaacaaaacttctgactctctccaacttaggaacagattatatgccaagctcatacaattgacaataaatggccatctgaaactttttccttagaatgtgtagtacagagtggttaaatccccagaacagtctacaacattataataataaaatgcacatgtgtaacaaataagcatcataatttaatgaaaaaagaaacattgaattagaatcaggagacatgcattcaggtcccaggtacttcaacttactaatattttgtgactttgagcaaactgggtattaaatttatttttattatatacatttaaggtatacaacatattttcatatacatacaatatattttcatatacctatatatagtgaaatcatttctacagtgagcaagttaacatacccaacaccttccatagttatcctttgtgtgtgtaagagcacctacaatctactcttaccaaaattttaatatacaatacaataatattaactatagacctcctctgtgcattaagtctctagacttactcatcctacataattgcaagtttgtaccctttgacctacatctccctattccctcctccttgagtaaattgtttaaccactttcaaatctgtttcttcacctataaaacgcaaattgtaattcatgtttatctcaagaaactattatgaagtgacagcattattcatttatttaataaccatctactgagtactggtagtgggcatttgttattttgaggctggcctccatttctgctaaaaagacccagattatccttcaggaaaattccatttttagccatattatttggataggatttgtccccatccccagatccacgagtgaactgtgactgacttaatccaatcagcatattttattactcaactacgtagttcagggtttctgcaataggcatgttaccaagtcagaaatggttatatgcaaagactcatttgttagtttgtaggaaagagcaatcagaagaaaaatctaagaatatgacggtgtggtataagaatgtatagtctacaaaaatttaataatcaacttgctaccataaggagagagtcagaagcttctggagagactatagtgtggagccttaagatgaagccaacgttatgactggccagaaggatggagagaaatcactgtgccatctcttgagcagctagatcaagctttgcctgaagtcagaaacctagccacttttcagttgcgtgaataattctctatgcaacacaatattatacatagcaatataaatgagtatttaaaatccactaaagttgtttttttctggggggtgcttgcaactggaagatacttcctatatacagtgcagtgtgctagacactaaagtgtagtaaaatgaagtatctacctttgataagtttagagtctagcctaggaactcaggattattatagcactatgaaagctaaccatcacatataaaagcatggacccccttcatttcttgataagaatgtctattggtgtttataatgagtattgtgatattcttaaaaggattattctggagtgaacctgaacaactcaccaaagagaacctggggaaatgaatggaatcagcatgtccttttaataggctcaggttattttaatatttatattctgtaaatgaggtgagagccaaaggcatctttcacacaggaaaaagcaatttagtgggaagtccaacaggggttaagatctttgaaataagatgttctacctctgacagtattctagctctgacagaaaactgacatgaaatagaataccatctgctattgcagttacgtggctactggtaagaactgaacaaaataagagctaagtcaagcttcaacagagtagtaacagtcatgccaaccagctaagagatatgcttcaagcaacatgagtaggacttgataaagaatccctgaagtatatgggagttccagaggccagaggcatggaaacctccaaaaagccaaaaacgaaaactgaacaaaaccagcccagccaacaccttgattttagcactgtgataccctgagtatagaacgcagtcaagcccacatggacttctgatctacaaaacttgagttaagaagtgggtgtggtttttagctgctaagtttccattactttgttacgcagcaattgaaaatgaatacagcgtgctttactcaaagtctgagtctctattgaatccaatgtcactttatataataaagctttttccttaatggtaacaagagagaaactggaatcatttttaggtgaaagttaaacatgtgaaatgactgcactgatagaaatctacatctatatatacacacatttatatttacatatatatatataacaggacaaaaggaaaaggaggaggctgtatcagtttcccattgctgcttacaaattaccacaaacttagtggttggcttaaaacaacacaaaagcattatcttaatagttacggaggtcagaagtctataatgagtcatcaaagccatgttccttttggaggctctagagtaaaatctatttccttaatttttccaacttctcaaagatgcctgcattctttggctcatggccccttcctccatcttcaaagccagcaaggtagcatctttcaatgctttccttgtataagggacccttgtgattacattgaacccacccaaataatacaagataatcttcccatttcaagatccctaacttaattacatctgcaaagtctcttttgccatataaggtagcattcacaggttttggtaattagaatgtaggcattttagggtgcattattctggtaattagaatgtagacatttttagggagcattattctatctaccacagggactattattaaaaccagttctttgaatacactttagggagtagcaaaaagcagactgttttatttggaagaaaaaggactaatcagacattaaaacctgtcctccagagagtattactgaagtatttttaaagtattttacctacctaatacttcaaaaagaagtacagttttctgtgcatgttcacgccaatacttcatgctttcaataactgcagaaataattcttaaagaactagctttttccttaaactgtaactgatacaatgaggtttccttttgaaaaaataagaaacatagtattagaaaaatatttgtttttttcatcatactcgtttaccttctacgtaaaaattctaagtccttacaatggacaagtgtgtaaaaagaactactgaaaattttagtatagttacttccctaaaataaggccatcaatactatattacagatggagaaaccagggtgcacttagagacaatcaagaggagaattatttatataggtattcattcactcattcattcattgactattttaaagcatcatatgccagatcctgtgacaaatataggtaaggccattcctttccctagtgcactcacactctaggggactctagggaaggagccagacacattcattcattcattcgtttcaaaagtgtttactgagcacctactacatgccaaacatagctatttaggaaaaattcatggacaaaacagtcaagatatctgtcctcgaagattttattgtctagtggaggatttaaaaaataagtaaacatataacagaatgtcaggaaatgtactttttttttaggaaaaaaacacacaaggtaaatggaaagagagagagatgggggttattattttaagtgggttgttgaatgaggacagtgggaacagcaagtataaaagccctgagatggaaatgttcttagcatttttgaagatcaactaagaatacagtgtgttaaaatactaattttcaaaggcaaggggacgctttcctttgtgagggtgagggttgtgaagaacatatgatgggaccttttttcaaaatacaggtagtttcttccctcttcccccgcttaacgaagattctaacatgcctcctgttgatgatggccacagtaaaccactgttactaaggtgattatgtcatataattcttgagtacaaggaaacataagattgagaaccactgtgaaacatgctttattaatcttatttccaacaaaaaacaaaacatgcaaaaacaaattttaccccgatggctttttgaaaagattgctttttcagacataagggcagaacaaaaactaacaactgtaagaagttgttaccattcctaggctgaaaggacaagaggagaaaataaaagtatcacgcccaggaaagctatactcatgaaggggctacatcatgcagtgacacagccactgctggtgatgtaacatttaagacaggagaaagtgagaaaacccaacctttcctcccaccctatgatgtcgtaccagtgactcctactggctgacctctagcaaaagccagcaagtaaacaatctcaggatgatgcactacataggacagttcagccttccacaacagagaagggcaggtgaagaatcaagtgggccaaggggccagggagcagagatgaggaataaccagcacacataatatataaataacatttacaaagagcaatcagagcactgagcgtagagaggaagtacagttgagatacaggtatagggaagaatataaaccaaagcacagagtgtatgctatgtttagagaattgtgacgagtctgaagtggctagagcattggacaattagtagactatgaaatatgaggctacaaaggtagactaggacaagatcataaagcaaaggtcataataagttgatcataaagaaaactatggcctgcagtgcaaatctaacctgctatctatttgtgtaaacatttgttggaggagagcagtgtccattcatttatgtattgcttatggctgcttccaagctacagtggcagagttgagtagtattgctgagtagctgcaacagagacagtacggcccataaagccaaaaatactgtctggccctttaagaaaaatgtttgctgacctctgttgaaaaatacttagaatgacatatcaagagcctgggtaacttcataaacaatggataaactgtctttatctttaaaatgagtgtaaagtgaaagtcagaatccagcagaaaactctaaagtttgaaaggaaaaggagcagccattcataccctctaagaaaatattttggaaactaacattcatccacttcaatggaactgaatatttatgctaatcaagtaatgtatgtcatggaatttatttcaggcgctcttatctctgtagttttctaaatatttacctcatatttttaaaaatgtaaataagtcattaatttgtatttaaacatttaccttcagggtgttgtcttctggaatatcatccaacatttgtttcttatattgattttgttgaaaattgggcttaagtgtctgtagtgcactgtttttgtctagccctctcattgtgcagccagatatttttgatgaatgtgtttgtctgagtagctcggtttctttgttgcgagataagttaggaggttcaggtattcttaattgtttttgttgttgagctcccgaactcactggacaagaattttttccatcatttgccactaagtttgttcgtttacattgaggcttaaaatcatttttattccaagttttcaagctggtatttttgttaccatctctgtagctgtaatagtgcaaaaaaaaagcatttgtttctatatggtttcttaattacaaaaaaaattaataatgaaaaattcatttatatggcaatttatgacttagaaagcactttataactaactactgagaaattccaaatacatcacaacaaccctacaatgttgtactacctctctttccagatgagaagactgatccctaatgaggaattaacttgtccaaagtcatacaggaaattactcacaagtctagaacccaggaaatacaagatctcccaactcagagtctagtactacaaagtatatttttaaatgatagcattcttcatatgatagtagttgtatccaagtggtaagactttgagggcatttacttgcttctttatatattcaattttaaaattttctacaaagtaaaattttaagaagttaaactgtggcttagcaatgattttaaatcacaaggagaatacatataagcaggatagatagctattaatatttgattagaaattttgtggttttactgcacagcttaaaagccctataatgtatttggtacagcatttgtcagcaacattaagtgtgttatatcagctgaccagaacattatgctagatgctaatgaggccaaaatcaaaagcataatttctgagcagcctagttaggagttccacaggaaacaaaactagtctaagtcacgaattttttttttttctcttggagacagggtctcgttctgttacccaggctggaatgtaatggcaagaacacagctcactctagcatcaatctcccaggctcaagcgatcctcccacctcagcctcctgagtagctggaactacaggtgagtgccactatgcccagctaatttttgttattttttgtagagacagggtttcaccacgttgcccaagctggccacaaactcctgggctcaagtgatccacctccttggcctcccaaagtgctggggctagaggcataagccaccattcccagcccacaaattcttaattctcagtaattttcctggaaataccacaagtatcacaagagggcaaccaatacaacccatcccctacttaggtaaataatccaaaaagaggtctaggtacactgctgaccaggaacaaatccaagttttatgaggtctgaagcttgtataatttggggaacactgttaattgggtacaaagttagtacaaaataacgagaaaagaaagcacaattacaacaatttaagttataaacaccacaaacatcacgatacccagaaaaaaattgttagaattattataaattaactgcctgatactcctttatagaaattttttcctacactgatcacttcttcatacgacaataattttgtaatttttttggactcaggccagtctcaaacccatgggcacaagtgattctcctgcctcaacctccagagtagctggcactacaggtacgtaccatcacacgcaacaattttgtaattttattttcaataaagagaacagaaacacaattttgtctttcctcactctcatggttatagaaattacttttattattcatagtctagaaaaatttatttcagctttacaactctctgttcagcacatttgtagtaatgccaaagatcactgatcacagatcatcataacagatataataataatgaaaaagtttgaaatattgcaagaagtaccaaaatgtgacatagaaacatgaagtgagcacatactgttggaaaatggcaccaatcgacttgctcaatgcagggttactacgaaactttgacttgtaaagaatgcagtatctgtgaagtgcaataaagcaaagtgcaacataataaggtatgcctatatgaggagaggctgagtggattaaagatccaactgtatgctgtctacaatgaactcagtttagattcaaagacacataaaagctgagaataaagggatggaaaaagatattccatgcaaacagcaaccaaaagaaaacaggggtggctaagtttatgtcagacaaaatagactttaagttaaaagttgtttctaaagacaaagaaagtcattatataatgataaatgggtaaattcaataggaagacataaaaattgtgaacatatatacatccaatatcagagcacctaaatatataaagcaaatattgacaaatctaaaaggaaaaattgacagcaacataataaaaaaaagaaagctcaatactccacttttaataatagataaatcatccagacagaaaaatcaataaacagtgaacttgaacaacactatggatcaaatggacccaaaagacatatatggaatttgccaaccaacagcagaagactacacattcttctcaagcacagatggaactttctgaaggataactcacgttaggtcacaaaaacagacttaacaaatttaagaagatcaaaatcacaccaagtatcttttctgaccataatggtataaaactagaaatcaataacagctagaaaatggaaaaattcgccaggcatggtggcttacgtctgtaatcccagcactttgggaggccgaggtgggcggatcacaaggccaagagatcgaaactgtcctggctaacatggtgaaaccccgtctctactaaaaatacaaaaattaggtgagtgtggtggcatgcacctgtagtcccagctacttgggaggctgaggcagaagaatcacttgaacctgggaggcggagattgcagtgagccgagattgcaccactgcactccagcctgggcgacagagcgagactctgtctcaattaaaaaaaaaaaaaagaaaaccagaaaagaaaatgaaaaaattcacaaatacaacaacaccctcttgaacaatcattgatcaaagagggaattaaaaaagaaaatcttaaaattattgagacagaaacaaaacataacataccaaaacttatgggaaagcaaaagcagtactaaggggagtttatagcaatgaatgcccaagtggaaataaaaagatctcaaataagcatcctaacttcacacttaaagaaattagaaaaagaataacaaactaagcccaaaataagcatataaaggcaataataagactagagtagaaataaataaaatagagaattaaaaaaaaaaaaaagcaaaactgggaccgggcgaggtggctcatacctgtaatcccagcactttgggaggccgaggcaggcggagcacaaggccaagagatcgagaccatcctggccaacatgatgaaaccccgtctctactaaaaatataaaaattagctgggcatggtggggcaggcctgtagtcccagctactcgggaggctgagacaggagaattgcttgaacccgagagtggaggttgcagtgagccgagatcgtgccactgcactccagcctggcaacagagtgagactccgtctcaaaaagaaaaaaaaagaaaaactaagagcttatttttttgaaaagataaagtcgacagccccttacatagactaaaaaaagaaaaaagaagatttaaataaatgaaagaggagacatacaatggatttctcagaaataaaaaagatcataaaggactattatgaacattatatgacaacaaattggataacacagaagaaatggataaatacctagaaacaagcaacttaccaagattgaatcaagaagaggcagaaagcctaaacagaccaataataaggagattaacgaagtaatcaaaaacctctcaacaaagaaaagcccaggaccagatgacttcacagtgaattctatcaaacattcaaagacaaattaataccaatctttctgaaattctttcataaaacaagagggaattccacttccaaattcattttatgagactagcatcactctgatatcaaaatcaaacaaagacactgctagaaaactacaggccaatatcactaaagaacatacatgcaaaaatcctcaataaatactagcaaggcaaattcaacagcacatcaaaaaaattacctgtcgagtactctgttcacttcatgggtgaggtgacaggatccatacttcaaaccttagcatcacacaatattcccatgtaaacaaatctgcacatgtaccgcttatatttaaagtgaaagttgaaatattttttaacaaaattatacaccatgattaactgggatttatttctgggatgcaaggttggtttaacatacgcaaatcaatcaatgttatacaccacagtagcagaattaaagacaaaaatagatgcagaaaaagcatctgacaaagttcaacatccattcagtttactctaaaaaaaataagtatagaaggaacatactccaacacaataaaggtcatttgcaaaattcccacagctaacatcataatgggggaaaactgaaagttttttttcaaagatccagtacgacgcaaggatgcccactctcaccacttctattcaaacatagttacaggctgggcattctaaatctgaaaatccaaaactcgaaatgctccaaaatttgaaactttttgagcaacaacatgatgctcaatggaaatgctcactgaagcatttcagattttgaattttcaaatttaggatactcaactggtaggtattctgaaaatattccaaactacaaaaaaatctgaaacatttctgatcccaaatatttcagacaagtaatactcaactagtcttggaagtcctagccaatcaattagccaagaaaaggaaataaaaggagcgcaaattggaaaggatgaagtaaatgtctctgtttgcagatgacatgatcttgtatgtagaaaaccctaaaaactccattaagaaactgttagaactaaaaaatgaattcagtaaaattgcaggatacaaaatcaacatacaaaaatcaggagcatttctttacaccaacaatagatattccaaaaggaaaccaagagaatgatcccatttacaataacaccaaaaagaataaaatacttaggaataaatgaccaagatagagaaaggtctatacactaaaaaatataaaacagattaaaaaaaaaaaacctgaagacaaaataaatgaaaaatcctgtgtcatggatttgaagaattgatattgttttttgttttatttatttatttatttttattattattattatactttaagttttagggtacatgtgcacaatgtgcaggtttgttacatatgtatacatgtgccatgctggtgtgctgcacccattaactcatctttagcattaggtatatctcctaatgctatccctcccccatcccccgaccccacaacagtccccagagtgtgatgttccccttcctgtgtccatgtgttctcattgttcaattcccatctatgagtgagaacatgcggtgtttggttttttgtccttgcgatagtttactgagaatgatgatttccaatttcatccatgtccctacaaaggacatgaactcatcattttttatggctgcatagtatttcatggtgtatatgtgccacattttcttaatccagtcaatcattgttggacatttgggttggttccaagtctttgctattgtgaatagtgccgcaataaacatgcgtgtgcatgtgtctttatagcagcatgatttatagtcctttgggtatatacccagtaatgggatggctgggtcaaatggtacttccagttctagatccttgaggaatcgccacactgacttccacaatggttgaactagtttacagtcccaccaacagtgtaaaagtgttcctatttctccacatcctctccagcacctgttgtttcctgactttttaatgatcgccattctaactggtgtgagatggtatctcattgtggttttgatttgcatttctctgatggccagtgatgatgagcattttttcatgtgtcttttggctgcataaatgtcttcttttaagaagtgtctgttcatatcctttgcccactttttgatggggtttttttttcttgtaaatttgttggagttcattgtagattctggatattagccctttgtcagatgagcaggttgcgaaaattttctcccattttgtaggttgcctgttcactctgatggtagtttcttttgctgtgcagaagctctttagtttcattagatcccatttgtcgattttgtcttttgttgccattgcttttggtgttttagacatgaagtccttgcccatgcctatgtcctgaatggtaatgcctaggttttcttctagggtttttatggttttaggtctaatgtttaagtctttaatccatcttgaattaatttttgtataaggtgtaaggaagggatccagtttcagctttctacatatggctagccagttttcccagcaccatttattaaatagggaatcctttccccattgcttggttttctcaggtttgtcaaagatcagatagttgtagatatgcggcgttatttctgagggctctgttctgttccattgatctatatctctgttttggtaccagtaccatgctgttttggttactgtagccttgtagtatagtttgaagtcaggtagcgtgatgcctccagctttgttcttttggcttaggattgacttggcgatgcgggctcttttttggttccatatgaactttaaagtagttttttccaattctgtgaagaaagtcattggtagcttgatggggatggcattgaatctaaaattaccttgggcagtatggccattttcacgatattgattcttcctacccatgagcatggaatgttcttccatttgtttgtatcctcttttatttcattgagcagtgatttgtagttctccttgaagaggtccttcacgtcccttgtaagttggattcctaagtattttattctctttgaagcaattgtgaatgggaattcactcatgatttggctctctgtttgtctgttattggtgtataagaatgcttcacaattaaaagaactagaaaagaaaaagcgaacacattcaaaagctagcagaaggcaagaagtaactaaaatcagagcagaactgaaggaaatagagacacaaaaaacccttcaaaaaattaatgaatccaggagctggttttctgaaaggatcaacaaaattgatagaccgctagcaagactaataaagaaaaaaagagagaagactcaaatagacgcaataaaaaatgataaaggggatatcaccaccgatcccacagaaatacaaactaccatcagagaatactacaaacatctctacacaaataaactagaaaatctagaagaaatggataaattcctcaacacatacactctcccaagactaaaccaggaagaagttgaatctctgaatagaccaataacaggagctgaaattgaggcaataatcaatagcttaccaatgaaaaagagtccaggaccagatggattcacagccgaattctaccagaggtacaaggaagagctggtaccattccttctgaaactattccaatcaatagaaaaagagggattcctccctaactcattttatgaggccagcatcatcccgataccaaagccgggcagagacacaacaaaaaaagataattttagaccaatatccttgatgaacattgatgcaaaaatcctcaataaaatactggcaaaccgaatccagcagcacatcaaaaagcttatccaccatgatcaagtgggcttcatccctgggatgcaaggctggttcaatatacgcaaatcaataaatgtaatccagcatataaacagagccaaagacaaaaaccacatgattatctcaatagatgcagaaaaggcccttgacaaaattcaacaacccttcatgctaaaaactctcaataaattaggtattgatgggatgtatctcaaaatagtaagggctatctatgacaaacccacagccaatatcatactgaatgggcaaaaactggaagcattccctttgaaaatgggcacaagacagggatgccctctctcaccactcctattcaacatagtgttggaagttctggccagggcaattaggcaggagaaggaaataaagggtattcaattaggaaaagaggaagtcaaattgtccctgtttgcagacgacatgattgtatatctagaaaaccccattgtctcagcccaaaatctccttaagctgataagcaacttcagcaaagtctcaggatacaaaatcaatgtacaagaattgatattgttaaatgtccaaactacccaaagtgatctacagactcaatgcaatccctatcaaaatttcaatgatgtttttcacagaaatagaaaaaacaatcctaaaattcatatggaaccacaaaagactctgaatagccaaaacaatcttgagaaagaataaagctgcagccatcacacttcctgatttcaagttatacctaaaagctacagtaatcaaaacagtatggtactggtattaaaacaggcacatagatcaacagaatagagagcccagaaataaacccatgcatttacatttaattgattttcaacaaaagtgagaagaacacacaatgagaaaaaaagtctctgccataaatagtgttggaaaaactggatatccagatgcagaataatggaactgaactctcaccttacaccatatacaaaaatcaactcaacatggattaaagacttaaatgtaagaactgaaaccataaaactcttaggaaaaaacgcagagaacaagctccttgacactggtcttgcaaatgactttttttaatatgacaccaaaagcacagtcaacaaaagcaaaaggaaatatttgagaactacatcaaactaaagagcttctgcacagtaaaggaaataatcaacagagtgaaaaggcaatctatagcatgggagaaaattttggcaaactatgtaactgttaagtagttaatatccaaaatatttaaggaattcacagaactcagtaacaaaaaacaacacaatttaaagatgggcaaagaacctaaatagacatttttgtaaagaagacacacagatggccaacaggtatataaaaaggtactcaacatcactaatcagcaggaaaatgcaaatcaaaactacaatgatatattatcaattcacacttgttaggatagctgtcatcaaaaattcaaaagataacaagtgttggcgagggtgcagaaaaaaggcaatccttgtacactcttggtggaaatgtaacttgatacagccattatgaaaaacagtatggaagttcctcaaaaaattaaaaacagaactactatataatctaacaattccacttctggatgtatatccaaaggaaatgaaattagtatctcaaagagatatctgcatttccagattcattgcagtattattcacaatagccaagagggccaggcacggtggctcacacctgtgatcccagcactttgggaggctgaggcaggtggatcacatgaggtcaggagttggagaccagcctggccaacatggtgaaaccccatctctactaaaatacgaaattagccaggcatagtggcacatgcctataatcccagttactcgagaggctgaggcaggagaatcacttgatcccaggaggtggaggttgcagtgagccaagaccacaccattgcactcacattgtcttgttgccactgcctgggcaacaagagcgaaacttcacaaaaaaaaaaaaaaaaaaaaaaaaattccaagatacgtaaacaatgcaagtgacagataaatggactaacaaatgtatcataaagagataacggaatactattcagacattaaaaagaagtaaatcctgccatttttgacaacatggatgaacctagaggatgttatgctaagtgaaataagtcagacacagaaagaatgtgtgggatctttacaaatcaaactcatagaagcagagcgtagaatagtggttaccaggggtgaagaggtgggagaaataaggtgatgtcagtcaaagggtacaaactttcagttacatagaatgagtaaattctagagatctaatgtagagcatgaggactatagttaataatactgtgttatacagatgaaaatcacttagaaggtagatcttaagtgttctcactacaagaaaaaaatggtaattatgtgaagagatggatatgttaattagcttgactgaaatcaggtcactatgtatatgcatattaaaatatcaggttgtacaccttaaatatatataattttttttaaaaaatactttttttgaaacaagatctcactttgtcacccaggctggagtgcagtggcaggatctcagctcactgcaacctccacctcccaggttccaatgattctactgcctcagcctcccaagtagctgggattacaggcatgcgccaccacgcctggctaatttttgtatttatttggtagagacggggtttccccatgttggccaggctggtctcaaactactgacctcaagtgatccgcccgcctccgcctcccaaagtgccgggattacaggtgtgagccactgcatctggccctaattaaaatttttttaagataacaatagaaatacaatattcaactgcagtcagaactgttaacaaagatgagactgtcaagagagtgttccagaggcaaataaagtccaaaagaaaatattcctcatatctttggccatcctgagcaagttgaaggagatctaaaagtttaaaaatttagttatatggatattgggggcctgccacctccttttatgaattactgacttaagttatatactattttatattattaaacttttataatagatctgtgtaacaagaatggttgaaagacatgatgtgttataagaaaacaattctgggtgaatcagagcaataggcattctaagtattccacacacaagcacgttagataaattcatgtatttgtaaaatccttaatcaagggttttcttggtaatgatagacaagacagcacaaagttatataaatacatcagaactgtgtgttttatccacaatatatattgagcactgaaggaaccttagatatcatctagttcaatttttttcccatggataaagacataagactcaaaaaaggtgaaatggcttttttctgttcaaaaataaattaatgattaactctggatcagtgcaactatgaataattttctttttaccttttttctagaattattctattattttcataatgagaatagtaagttattttagaaaaaaataatatccttatcttcccttaaaatttatgcatttatctgaacccgtttgccaggttgtgttcagttctcagcttctaaagccttcatctcaccgagcacaatagtgtatgcctgtaatcccagcactttgggaggctgaggtgagggaatcacttgagcccaggagttcaagaccagcctgggcaacacagcaaggcctcatctctactaaaaatgtaaaaataagccaggcatggtggtgcaaacctatagtcagtcccgcctactcaggaggctgaggtaggaggattgtttaagcccaggagttcaaggttgcaatgagctatgatcatgccactgcactccagcctgggcaacatggcaagatccagtctcaaaaaaaaaaaaaaaaaaaaaagattaaaaatgttaaaagtcctcatatcacctcaactcctcaactgagatgtcttaactactaaaagtacaagctcaatgtctcctcagagtctaaagccaattgtaggggctttggcaaagaagctcatccttactaatcttactaattgtccatatcctaatactggtgaatgaaatctatattgataatgtatctaataacacagtatctataagaataggagtgtactttgctcttgaaaactccatgccccaagaaagtatagactaggctgctagaaacaatacaggatggccagttaaatttgcatttcaagtaagtaacaaatttttggtataagtatgtcccaaatattggctgtgacacatactaaaaaattcctgattacctgaaattcagatttaactgggcatcctttatttttatttgctaaatctggcaactgtagcctggactctaaacctgaagattagtcctttaactggttcaaaagatcttcagcagattaccaactgcctgcatggatttttaaatgttctgtactcctggatttcctgttgtattccaacagtctgacagctcatgtattaattcaaattgtaatatccaatactggctgcctgtccagattacaatctgtttacctaattatctgtctaatgcttgtcagaatggattttcttctagctcctgcagttggaacaatgtctctaagaaccatcccaaaccactgaacaggcctagttttaaggccttgttatgaagaaactgacagactggtcctggggaaactagcatgaataataaaatcaaaactaatttttaaataaagatattatttcaatgtatttattaacaactatataaaaagttcccccttttaaaaaaatacgatatctttatataataaaaatgagaatagtattaacttcatatggttgttgtaaggattattgaaataacatatcaaagcacttaacagtgactgatttggtgttgttttcccagcactttgtttccaaaatcatttccttctatattgccatttatccaaggctactaaaatccaaccaagagaaatccatgttctttttctatcaattttttcatactatttaaacattaagctttggtccttatggcaagaaccctcaccatctttttgaccagcttcttcatttcttgagcccctactattgcagatgcatatgcatcacagcctccatttttctttcttctgccattccgtttaccttgaagccggctgtcttacaggataagactgagcactctaattggttctcaagtcctaaatataatcaatactaagatatgattcctgtctattgtcaattaaatcattaataacccataagcaaaatcataaattcatagcaatgaatattggcagaaatttcattgtcatattaagaatcttttgaagcataatcactgtgaaatttacatattttttaagttttacatgcatgttctcttaagctctttcataaaacataattaatactgccatagttgttatttatagaaatttcctaaatgtaattctgtctgagaaacaacgaagtgaaggaggagggaagaatgaagaggaagacaggaaaatgagaaggaatagaagaagaaagaaattttaagtagactcacctccaaccaccctggcttcttccagtatttgattgaatagagttaaagacagaatcttgacttctcagaggacgagaaactgaatgtggtatttgcctttcaagggaatatgtcttgttaaatattaatagtttgctttcaaattgagaaattaagatatacgtagaagaacaacatcagttagtaacagacacacatccaatggtttatatttctccacatacccggtgtccactgttttcattacaggagccaactctggattcacagcttcccaggcccaatctcaaaagatataagtaacatagataaaagtaagataggtagtatttttcaaaatgataaattcatacttatttaatttggagggtttaaaaacttgaagaagaaaaaacttgaatatatggatttcttcaacagtacttgttggaaaacctgtcacagcctgctttattaatttttatagatgtctttcttatccattgtattttaagcaaagataatttaatctgtatcttttctacaatcagttctagtatagtatctttaactttgtaacatgaatttcatctaatccaatgtttactgaacttttaaaatctcacccacagaaagaaatacatcataactcagaacatatacatgcatgatatatgtgtgagacagagatagagaggagaaaaaagaatataaaacttcatcaaatcttatccttaatatgtgtgatacacactgacacagtcatgtgtcacttaatgacagggatacagtctaagaaatgcattgttaggtgagtttgttgtgcaaacaacatagagtgtacttacacaaagctggagagtacagcttgctacacacctaggctatatgttacagcctattgttcctaggctacaaacttgtgcaacatgttactgtactcaataccacaggcaattgtaacataatagtatttgtgtatctaaacatatctaaacatagaaaaggtacagtaaaaatataatataaaagataaaaaccaatacacctaagagggcacttaccataaatggagcttgcaggactgaaagttgctttgggtgagttagtgattaagtggtgagtgaatacgaaggcctaggacattactgtatacactactgtacactaaacacaccatacatttaggctacatttataaaaaaaaataaactgtgctatgacattatgacagctactatgtcaccaggagacagaaatgtttcagctccattatatttgtaatggcaccaccatcacacaggtggtgtgattgaccaaaacatggttatgcagtgcatggctgtattttctattctactctattctcttctatttcttttttcaaagatcgattatacctcagactgattaatggatcaagacaaacattttaaaaaaacactgatcctctccctctccctctccctctccctctccctctccctctgcctctccctctgcctctccctctccctctccccacggtctccctctccctctgtttccacggtctccctctcatgccaagccgaagctggactgtactgctgccatctcggctcactgcaacctccctgcctgattctcctgcctcaccctgccgagtgcctgcgattgcaggcgcgcgccgccacgcctgactggttttcgtatttttttggtggagacgggtttcgctgtgttggccgggctggtctccagctcctaaccgcgagtgatccgccagcctcggcctccggaggtgccgggattgcagacggtgtctggttcactcagtgctcaatggtgcccaggctggagtgcagtggcgtgatctcggctcgctacaacctccacctcccagccgcctgccttggcctcccaaagtgcccagagtgcagcctctgcccggccgccaccccgtctgggaagtgaggagcgtctctgcctggccgcccatcgtctgggatgtgaggagcccctctgcctggctgcccagtctggaaagtgaggagtgtctctgcccggccgccgtcccatctaggaagtgagaagcgcctcttcccggccgccatcccatctaggaagtgaggagcgtctctgccgggccgcccatcgtctgagatgtggggagcacctttgccccgccgccccatctgggatgtgaggagcgcctctgcccggccgcgaccccgtctgggaggtgaggagcgtctctgcccagccgccccatctgagaagggaggagaccctccgcccggcaaccgccccgtctgagaagtgaggagcccctccgcccggcagccgccccgtctgagaagtgaggagcccctccgcccggcagccaccccgtctgggaagtgaggagcgtctccgcccggcagccaccccgtctgggaggggggtgggggggggtcagccccccacccggccagccgcccggtctgggaggtgaggggcgcctctgcccagccgcccctactgggaagtgaggagcccctctgcccggccagccgctccgtccgggagggaggtgggggggtcagcccccagcccggccagccgccccgtccgggagggaggtggggggtcagcccctccacccggcagccaccccgtctgggaagtgaggagcgtctccgcccggcagccaccccgtccgggagggaggtgggggggtcagccccccgcccggccagccgcctcgtccaggaggtgaggggcgcctctgcccggccgcccctactgggaagtgaggagcccctctgcccggccaccaccccgtctgggaggtgtgcccaacagctcattgagaacgggccatgatgacaatggcggttttgtggaatagaaagcggggaaaggtggggaaaagattgagaaatcggatggttgccgtgtcagtgtagaaagaagtagacatgggagacttttcattttgttctgtactaagaaaaattcttctgccttgggatcctgttgatctgtgaccttaccccccaaccctgtgctctctcaaacatgtgctgtgtccactcagggttaaatggattaagggcagtgcaagatgtgctttgttaaacagatgcttgaaggcagcatgctcgttaagagtcatcaccactccctaatctcaagtacccagggacacaaacactgcggaaggccgcagggtcctctgcctaggaaaaccagagacctttgttcacttgtttatctgctgaccttccctccactattgtcctatgaccctgccaaatccccctctgtgagaaacacccaagaatgatcaataaaaataaaaatttaaaaaacaaaaaaaaacaacactgatgcagtcctatctcttacccaatacaggaaaactactatttctgacaaatagtaaccctggtccgagcttgaagtacttcaggaggacacacatttccttatggagtagctcaatttttcaaggtcaacattcatgctacttataaaaatattttaaatgacggaatgttttttaaatggtggagtatgaccagataaatgcccagttgtgcatatccatgtgaatttatgatttttatacacaaaaattggaaatatatgaacttcacacttaaatttcttcaaatatatcttttatatattttgttttctttaaacaaaatacagatttagaagtatattaaagtctatgggagcacactagatgaaattaacaatacaagtattgctacatcagagatatttttaaattctagctatataagatcctattaatttttaaaatgtgcccccaaaatgtaaatgtatataaccagcatgtaccacgtatacttcagaatgtctgcctgcccattcctcttccagaggaaagtaaaaagtcaacaacaaccattaagacctcccagcacccaccaaacctcagctaactggttcagaggtaagaggcctaacccaaacctaagccaggatttcagtggccttacttaaaagatgagctgaatcacaagctgtctctaggatgtgaattaagagatccagagggcagtctactggtgacctctgagaactagaactaaaaggttatgcaaactcacaggaagggcaacttagctcatgtgccagttgaagctgtaaggaagccaactggatgaaggtgtgtcttagtccctttggactctactataacaaaatactttagaacgggttatttacaaatatgataaatgtatttctcagttttggaggctgggaagtcaaggcttcttactgtgtcctcacatgacagaaggacggaaaagctccctcataccttttataaagtcactaatctcattcatgagggctctgccctcatgacttaattacctcctgaaggccccacatcttaatactatcacaccagcaattaagtttcaacatataaattgggggggatcacatttggaccataaacagctaacaaatcaatgaaggcaaaaatgccataaaaagagaaaaagactacggccaggcaccagatacttccaggcatctgcacttcctaaaatctatcttttttttcccatttttcctgtgttcccatgcacacttatccccactcctgaggcaattcaagtgtttccattctttaccaccaaatgtataggctataacacaatatccacgtgaattttgacaaagaaaaaatattttttacaatatatgttactactttattagaacaaagactccaaatctaagatactccatttaaatgctaagccacccttgtagataaggaaacttaaactcctgacctggaatgttcagaaagtgctatgtaatttctatatgtggataatggaaagaagaaaaaataaactttctattttcattataatataaattacaattttctataatcctagttttgtatttcctgaaaatttttaccttattaattttcttacctgtaggtagaggaggaaaatcataattgtcagaaggggtactgatacctgaatcatctttaagtggattagaagttaatggctgtctgttcctctttttctgattgaacaacggaacaggcaaacagcctaaattgaatgtaccaataaattagtacataatagacaaataagcagatctagttgtaaaataattactagtataatacacactttacatttatctacttctatatgctaatatacttatagatttctataaccttagaatgatttttacattctttttaagatcctgaatagcctaatttgtttcttcaaaaaacttttcttattctactctaacagttttaattcctcccatatggaagtaattcccatctcccccctcatcccccaacctttccaaatccactttttgttttccttatccccctcctgtgcttgcctgttaccatatcgactgcaggggacctttgaagtacaacagaggtgaggaagaaccaaactctgaaccatgctttggacaatagtggcacacccttttgggccttggttctcaaagtttcattggactaagatttatctggaattctgcttaatgtgcagttcctagactccactctcatagattttatttcaacagatttagcctggaactcaaaactctgcaattttaacaagcacctcgggtatctgtaattatatattttgtggatcattttgagaatgccttaaagagtaataatatccagtccaaatgagaataaatactactaccgattcctccagatggcggatctaggatctcaattcaggtcaaaagtcacaaaatataaactttgaaacttagggaactcgaagggaaaagaagttcaaaaagcttgtgcattgctatagagcaagtcagtggaagaatctagataggacacaagattcctaaatatcagtttggatctcttgccactgtaccattctctaactggtcatcatcaattgttctacaggcaaatacagactctgtgaacagtctctgatgaaaggctgggagaattatgtgggctctggaatcagaccgcctaggtcttgaattatgacttcaaagtaggtttgaattacaatttcagagtatgatcttgggcaatttccctaaactctttgtgccaatatgacatatactgatagcataatgattaagagcatggactaagagccagattcctaggttcaaattctgattctgctacttcatggattacttatttaacctcttttagccttgtttttctcatctgaacaacagaaatgattataataacctatctcagggtattggtgtaaagattaaataaattaatatatataattaatgtcttgaatacagttaatccaccataaataatagttactattatcttcattatgcatcatcattcccctggttctcatcatccttgccatctgtctttatactaataaattgggaaagcaaaaatgataggagaagctattagaaagacagaagtgcttccggaaatatttttaacaagtaagtcacaaatacaaacaaaaatagatctatttctttgttttcagttttaaagcatagaataactcaagcacatcgaatttgtagaaagaatatcaaaataaatctaagaaactttgatcttactcccacctctaccactaaatgttttgtcttgagtaagttattttacttccttggacctaaaaagtaaagaggctagattaactgttcaatctattttaaatttatttccaatgttatatctataaactatacaagctttatatgctatacagaaaatttaaaaataaaaagttgttcaatacctgctgtacttcgagctgaattttcatttaggcttcgcttcatttccttcaatatcaaaatctataattttctattcagcattccaaatttataatatgacattgtcccactagacctgcaaagaaagaaacttataactcgtattgtctcaactataaaacccaatcctcagcccagtgattactgaaattatggttgtaaactactttcaaacctgatcacgtaaacactttagggagtcctttgctttctaagagtttacaccataatccacttttccaaccctgttcaaattaagttatgactagggcaactgtaaccttgcttcgtaaacatatgtgcattttttcacacagtatatgtaatttatttcagaatcccgcacccacaaagagaattctgaaccacacctacaaagaggaaaatggaccacagcgttggcaaacgtacatgcttccaaggccaaggaggaaacacagtatttagccaccgggaacttcctccatgccccactttaaggcattgtgcaggacatctgcctttgcatcagtttgaaatgcctggattatataatatcaaagactaagtcttcctgaggtcaggagttcaagaccagcctggccaacatggcaaaagcccatctctactaaaaatacaaaattagccaggagtggtggcgggcgcctgtaatcccagctactcgggaggccgaggcaggagaatcgcttgagcccgagaggccgaggttgcagtgagctgagatcgtgccactgcactccagcctgggcaacaagacccagactccatctcaaaaaaaaaaaaaaaaaaaaaagactaagtcctcccttcatatctagaataattgtaatgacaagtttccactccatttccacaacttcaacaagtgaaacaagtttttccttagttttcttcttttacaatagaatttctcttgtaattttgcacgtttagccccttaacacatttcatccccaatctaatacaacgaacacttgcccactgcaagaagaggcaagatacaaacccaaaccaggtaacttctgttccaaattcacaacccaatgagacagacagaccgacacatacacaactaagcaataatgcaagtcaggccgaggtgttaactttcaaatatcgtttgtaaaaataaaacttgggaaacaggccgggtgcagtggctcacgcctgtaatcccagcactttgggaggccgagacgggcggatcacgagatcaggagatcaagaccatcctggctaacagagggaaaccccgtctctactaaaaaatacaaaaaaattagccgggcgtggtggcaggcacctgtggtcccagctactcgtgaggctgaggcaggagaatggcatgaactcgggaggcggaggttgcagtgagcggagatcgtgccgctgcactccagcctgggcgacagagcgagactccgtctcaaaaaaaaaagaaaaaaaaacaacttgggaaacacgaggtcaggtgctgcctctgttttgtttccacatcttaggcttgaagctgggtagaagagatggaccctttagaaaatattcctggtggccaggtgcagtggctcatgcctgtgatcccagcacttcgggaggccaaggcaagtgggtcacctgaggtcgggagttcaagaccagcctgaccaacaacgtgaaaccccgtctctactaaaaatacaaaaattagccgggcatggtggtgcgtgcctgtaatcccagctaccctggaggctgagacaggagaatcacttgaacccgggaggcggaggttgcagtgagccgagatcacgccactgcactccagcctgggcgacagagcgagactctagggaaaaaatggagagagggaggaagggagggagggaagggaaggaaggaaggaagggaaaggaaaggaaaggaaaatattcttggcgccatcctaggagccacaacagggattctgccactttctccaccggcgcaactcacatcctatatttagaggggcttacgagggctattatgtttctcaggatcaaacaaacagaataaacaacaacaaaatttttaagtgtaacattccacccgcgggaccattgatcctgagggcggggaccctcatttacccccaatcccagctcccaaatggacctaagtggcgttagtaatggggttggtggcattggtgtgcaaaaagtgtgctcaatctgcacgcacacacacacacaccacccacaaaaaccacggcctcaaatggcggcctgttttggctcctgaccgcggtgggagagaagaggctccagtccgagttgagacgctcttccaaaggcctctcctgacccgcccacggagtgggggcagtttggtatcaacgcacagtctttcccttctaggccctcctgccaacacgacacacaactttcgccctcagtttccctcgcctccgtcaaccgtcgtccaggcggccccgtcagcaaccgccgcccttcccgcccgcgaagaaagcgcgggaatcaggctgttcgcaggcgccgtggaccgcgcaggcgcagtggccgccacctcggcgcgatggcatcttcgctgcctgcctggccgcccttggccgggcgcgatgacgttaacgctcttccttggcgttctcacactgtggacccagggatggctccagctccttagagttttgcccagagaggaaaggagactgtcctgtgactggagagacagaggcagatctcctgcccaaccggcctcagccccaccatcgtctaaaaagtgtgccccacttcccctcaccccctggcccttagggtccagacatccgtttgttagatgctggtggccacccagagtgtgcccagagattgactcgaaggccacccgaggtgtctggctcaatttctgggtcggatcagggtcagggaatctgagtccccgggaggctggggacagagctgaagcccaggttcagatggcggccatggaaggcggagagccgtcagcgaggcagcgccggggctgcgggagcttgcgggagggaagcgcccgtgagccgcagagacgctctgcaggggaagccgcgtggtgtgcgaccctgggcgttgagctccaggcttcctggcaaagaggactgtggattcctggccctgtgaccttgggcaagttacttactgaacaccctctggacctaccagtaaaagaacaataacaacaatcgccctaaaaatactagaagatgaaatagacaatcctggcacacagtaaatgcccagtaactgttagcccttatttaatttgagtaacagtagctgccatttatccggaacttactatgggccaggtagtggattctagagctgtctgagttcaaagcccatgttttgttgttaccgtatcttctaaccatttgaagactgggatagggaagggcttagagatgaaaggaagattgttagtaaaggcctaggcctataagaccacagacattttagtagttgctttaaaactatctcaagtaaagaagagtgttagaaaataatattagatgtagactgagaccagataatagcagaccttgaatgccagagtaaggaacagctttcaaggaatagggccatcttttattttgggaagaagaagacttgaacaataaaaataaaacttgttatttatcatggttccagagaggagttacccaaaacatgaatagaagcttcagggaagcagattttgacttgatatctacatacggatgtgcatacatttacaacacacacccacccaccccaaaaatagatttttcattaaaaaaaaaaaaaaaaaaccaccttaagccgattacttctgtagggactgcagacatgagcaatatagaatatttgctagcagtttataaacttaatctgttttatacttgtctttttctgcttatttatttccacctggaaagttggtcaggatggatcacagggaaggagaaaactaaagtagtaaaagtagtttgattacataactactgaacatcacattatgtatgagacatcttatgtataatatttaacaaaaaacccttcttatcccccagtcataccatttgggaaacaacccaccttaaatttgtctcctacaaaatttctggcagggatctactggacagccatgactgtgaagtaaaactctgctctccttttgttttgttttgttttgtttttgagacggagtttcgctcttgttccccaggttggagtgcaatggcacaatctcagctcactgcaacctccgccttctaggttcaagtgattctcctgcctcagcctcctgagtaactaggattacaggcacccgccaccacgcccaggtaattttgtatttttagtagagacggggtttcaccatgttggccaggatggtctcgaactcctgaccttaggtgatccgcccacctcggcctcccaaagtgctgggattacaagcatgagaccacacctggcatccttttgttttaaactacattattttattaatacatcaggcaactctatcccacaaaacatttgtaatgctggaagttatgcttactcttttaagtacttcagaatattatatattcaacttaataatgagatagtgacaattcgaaagggtttcacttcgtatactatcagttcgctgagaactaataaaaaagtgtggttttttgggtcatcccaaaaatcaagtacactttgggaaacagggagttaaaaatctttcggaagttaacttggtataagagtatgaaaagcctctgttgctctacttctgaggaaatgctctcctttttcctaataaagctttccacagaagacaaactctgtacacaaaaaacaaggtaagtatgggaaataattgctgcaattcattaactctcaaaaaagttattcattttgacatgtaagagaaactttatttatgaatgtgaaatgtgcttcaaagtgctgatctgttaaaattccataaaacaagcttcaaaatgcaagtcatttgtgccagctacgagtaaataactgaagcagcatttccagagagactagggcaaaggacagaacaaactacaaatcagcagaaaagaaaccaagcatagtagagtgttaataattcaccatggttactgctcttaaaaccaaagcaactaaacaactgtcatctgtttacttttacgtgtgttttcatcatctctacaccgtctgaagtgttcagtgtacatggatgtggacagacagtcaaagcctacaggagctttttttttctattagaacagtcattttaatgcatagatttgatgtggttattttgctttctctatctctgcattataagctcttaaaggaagaacattcagtgggtttattaaatattaggaagcattcatattttatttttccaccatgtatttggtttgtatgcatgtttgtttcctgagcacactgtaatggctgtttatgtgaattctgaaagagcaaaactagaactgtgaagaagaccaaaaataacagagaggcaccctattgtcctgtgaaaaacactagacttgggatgagaaacatgggtctcaggcctaggttctcctacatccctgcagaaccttaactgagttacttaacctctctttcgtttacccctgcagtggggatgtcaacacctaacccaccctatcgtataaaattaatgtatgaataaactgagtgaaaggacattataaattaaactctgcaattgtaataaattactcttattgtaccctctatcaaacaacctggcgttactagtacatggtattcccagtacttgaacatatgtgactttctgggtgactgagcatgaaatcaaatcagatttggctcagagtcatttctccaaagggatgtaatcatcttagtattctggaaaatttcccctaataagacccctttttgagtaacacagtccagtggagagtccccgctgacagtgaataaggctgtgtctatgtaagttcacatgatgtggttagcacatgcagtgtgtcccaagacattttcaggcatcacaaaaacttgaaaagtactaacagttgtctttcctttggtatttaggcaaaaaatgaggaagattcataagtaagttaacacagaattaccaaaaacctcatgagaaagaaatgaagggatgtttcagggtagcttttcgagtcccaagtgatcattgatttggcccttctgtttctgattgtgaaaaagcattctgaaagaatgggcgccggttcaagaggaggtctctgagggtcagcctttggctgtttatagaggtgagattcaaatgccctcagatcatgaaaagtgcttgaactcatttcagagaagaaatgttttgaaatgcccgtggaaatactgagtgggccacttttttattttgtgaaattagaaacgtataaactatttttattattacagataattgtgaaagcctcactggatgacatcctagctgaggaaaagaatggaatttttgtattagtatgaaatgctaatttattactgtatttagatctactgaccatctgagggagttagaagttaaagtaaacagctgtatctctagttgatctttgcatattttaatccaaatatggcaaagggcagggctaaagaagggagtgtccataaacggggctcagaacttgtaacagaaaattaaaatatactccactcaagggaattctgtactttgccctttgggtaaagtctcatttacatttctaaacctttcttaagaaaatcgaatttcctttgatctctcttctgaattgcagaaatcagataaaaactacttggtgaaatgacttcttgtcacattgctgaagaacatatacaaaaggttgctatctttggaggaacccatgggaatgagctaaccggagtatttctggttaagcattggctagagaatggcgctgagattcagagaacagggctggaggtaaaaccatttattactaaccccagagcagtgaagaagtgtaccagatatattgactgtgacctgaatcgcatttttgaccttgaaaatcttgggtaagactatgctttgtattgtatatgtatgtatgttgtgtgaaaagtggtaggtgtgtgaaagagaacacatatatgtatatgcagatgataattcatgtccgtacatgcagtcgtatgttgaataagatcactttcacttttaattatactgcattgtgaattgcacaattatctaaactgggcattcacatgctcttttataaaccttcttaagcaccagattattaagttttcttttcaaatgtatacagactgagacaataaatagaaaagggttttgttttaaaatcatacctttaaagaaacagatttaatactcctttgcattgagttagtgtttggccactatgcttgcatataaaattgttagctttttaggaaattcactacgttttcaagcaactatgcttacggtaatgcataaagttctagttcaaaaaatgtaatgtttcaagtaatatttgttgaatgaaagcgtgattaaatatcttttgtcagaagacatcagacactttgggaggccgaggcaggcggatcacgaggtcaggagatcgagaccatcctggctaatgcagtgaaaccccatctctactaaaaatacaaaaaattagccgggcgtagtggcgggtgcctgtagtcccagctacttgggaggctgaggcaggagaatggcgtgaacccgggaggcggagcttgcagtgagccaagattgtgccactgcactccagcctgggagacagagcaagactccgtctcaaaaaaataaataaataaataaaaataaagacatcagacctccctgtgatccgaagtagcagacgtacttaacttccatggtggattgttgtagatgggataccagagatgagaactaaagacaccatctgaattttcagagcttatattttgctgatttgtaatatattgcatacaacgtaagcagtcataacatgctaggttaggtccttattaattatttttgccttcgtttacatcataatagctaccactgtggatataatatgactccacatatttgctttttaccacttctttctttctttctctttttgagatggagtttcgctcttgttgcccagtctggagtgcaatggtgcaatctcagctcactgcagcctccacctccgggttaaagtgattctcctgcctcaacctcccgagtagctgggattacaggcacttgccaccatgtccgggtaattttttgtatttttagtagagacggggtttctccatgttggccaggctggtctcaaactcctggcctcaggtgatctgcctgcctcagcctcccaaagtgctgggattataggcatgagccaccgcgctgggccgctttttttcttttactaaaaaatattctgaaacatctgtttttctcaggaaactgtgccaggtactgggggagtacacagctctatacaacttggtttctacccctcaaggagttggtagactactagctaagatataagatacatggccgggcacagtggctcacacctgtaatcccaacactttgggaggctgaggcaggcagatcatgaggtcaggagatcaagaccatcctggctaacacggtaaaaccccgtctctactaaaaaaaatacaaaaaattagccgggcatggtggcgggcacctgtagtcccagctattcgggagactgaggcaggagaatggcgtgaacctgggaggcggagcttgcagtgagcagagatggtgccactgcactccagcctgggtgacagagcgagactccgtctcaaaaaaaaaaatatatatatatataagatatgcacaggcacaactagccactgttctatgtgcttgttttctgatcaactctaatttgagttagatcactccttaggtttagtctcaacacagatcaaaacatggacactactcttaatagaaacatgcctcactttatggaatagatgtttttcagggcaattatactgcagtcatcctgtttgtatcaaatcatatttttactagcataaattttaatttgagaaatgctttatcttcatgactgaggttatgtcaacacaattcatgcttatctattgacctaagagagctgttaactaacttctatattacaagtaagaatttgttgaaggataacttttagtcggcatattaacttcccaaataggtgtgaaatggactggggtgagtttatgagcacccagtagtatgcatttcagtgagcacagtcttttcacttaaattcactttctgctccttactgttaacactgttcagagactagactgttcccagcgtggttgaaaaattataaaatagataaactaattaacttctcccatcctgcctctcccaaatttattcattttcctatattcctcatctcagtggtggcatcattatccaccaagtcccctgtgaaaatcaccctagaaccttcccagtcctttgtctcccacgtctagtgggtcactaagtcctcccaattattccttgcaagtacttcacaaatccagccttcctctccagttttactaccttagttgatttcctctgtggacagttagaatagcctcctaaagggtctctctgcatccagacttgctctgacccttcctgtcatctattttccatctgatacctctaggaatcatcctaatatgcaaatcttatcatgtctctcccctgctgaaaattctttaaaaatgtatccagaatagatttaatcaacttagtatggctaatgcccttcagaatctcactcttccctattcttcatcccttgggactcttccaatgggagctcaactgcaggcatgagaactcaaaagtgtccatctttttgaaaacttccagacttgactctgagcaactgggtagatactagcaccatttactcaaatgcggaagaatgatatagaaccaaaattgtcgggcgcgacctcagggggttatttcatgaattaacttttaaaatgtataaatatccattaggcttggtttgcatacaataggaacctaagaatagtggtttaaacaaataagggtttcttgttcacaaataataagtccagaagtaggctgtccagggctgatggagcggccacatgatatcatcaatgccacaggctccttctaccttcccacagcactgtctcaacatggccccttccaccttcccactgcaccatctcaacgtggccctttccaccttccccctgcaccgactcgacgtggtcccttctaccttcccagtgcactatctcaagatgccggctttgtcctcatggtttttgcttcaaagtcacaaaataactactccaccttcctgatctcattccaggcaggaattagcccattgtacacagtaggtcccttgaagatactagcaaaaataaccaaggaatacaaatagatggaattttaggaaaatgtggttgaacggtttaatgaggaaaagtaaatgaaaaacattattatatctagaaaaaaaatgtatcttaaccattgtgggaagtggggagagggtagaggcccatttgagaatggaagaaaaactactggcccttgtgccagaaaaaaaatacatatatctgtacctgcaaacttgtggcctttttggagaggttagactctgaaaactctgtccctggacctctagtggttcctggacctcaattaagaatctctaattaggccaggtgtggctgctcatacttgtaattccagcactttgggaggccaaggcaggaggattgcctgaggccaagacttctgtaaccacccagcaagttctcctcatccgctgcccagacagagctgatttatcaagacaagggaactgcaataaagagtttaattcacacagagccggctgtacagaaggccagagttttattattactcaaatcagtctccccgaaaattcagacactggaatttttaaggataatttggtgggtagggggccagtgagtcgggagtgctgattgatcagattgaaggtaaaatcatagggagttggagctgtcctcttgcgctgaatcagttcctacgtggggaccacgagaccagataagccagtttatccatctgggtggtgccagctgatctgtcaactcagggtttacaaaatatctcaagccctgatcttaggttttacaatagtgatgttatccccaggagcaatttcaggaggttcagaatcttgcggccctccagctgcatgactcctaaaccataatttctcatcttgtggctaatttgttagtcctgcaaaggcagtctagtccccaggtaggaagggggcttgttttgggaaagggctgttatcatctttgtttcaaagttaagctgtaagttcctcccaaagttagttcagtttacacccaggcatgaacaaggatagcttggagattagaagcaagatggagtcaggttagatctctttcattgtaataattgtctcagttataatttttgcaaaggcagttttagttcaagaccagcctgggcaacagagcaagactgtatctccacaaaagataagaagattagctgggcatggtggcacgcacctgtagtttcagcagctactcaggaggctgagatgggaagattgcttgagcccaggagtttgagggtacagtgatccataattgggccactgcactccagcctgggcaacagagcagaatcctgtctcaaaaaattaaaaattaaaatgatctctaattagattatgtgagcccctaagtgactatatttgtgcactagaattagctaaagtgggggaaaaaaagatgcatttgatggtctagtcccataataaataacccagtgtaccataactactaagaaactgttcattaaattaatggatatgttgcgttcaagattgaaatcaaatgataaattctgtttgatatgtcctattcatgaccagccacataaatgcacgtattacttcgcaagcatgccaatgcaacattagttatatggaatcaaatgaagaaaaagaatgtaagttttcatatataaacatttcaggtaagtttttacttaccacacagatttttcatattaaagatttggcgactggttctttttacactgtgttcttattatatgtttatattatctcaggcacagatgttgttcatctttttctttctgcttataacagcaaaaaaatgtcagaagatttgccatatgaagtgagaagggctcaagaaataaatcatttatttggtccaaaagacagtgaagattcctatgacattatttttgaccttcacaacaccacctctaacatggggtgcactcttattcttgaggattccaggaataactttttaattcagatgtttcattacattaaggtaatgttaatgttattaatttataagttagcaaaggacttgtacttttaagtcaattatggatgtgagacaatcagaaaacagttatgagggaaggtgcaagagaaatggggtttattccatagccaggcttggtggttggggggaaagggtgctaccagaacacagaggcagtggtgagaggaaggagaaaaagagaggaaataagtaaaataataaacacaattaataaagtaataaaacacttgtggattcttgtgtctataaaattacacgttttatccagacagccaccagatggtggggtatttgttaaaaccaagtaaaattaatattaaaagtttaaatggtatggtcaatttgttaaaaccaagtaaaattaatattaaaactttaaatggtatgggatctcaattacaaggttttaggaaacttaagaaatagtcctttaacgtagactaaagcccagtgataaaaagattgcctccctttagtcctgccctcgtccccatttgatttagacaccccagaatacgtctaatctttcagtacttcataatcattttaaggctcagaaatctcagagaaaatttgctagaaaatagcaaccaaccagaaacacacataaggaactgtatgcttatttctgtgtactagatagccttccttcctgagagcaaggatgattgagaggaaagagtgtggcctgtgctcagatcctgactttctccttcactaaccttagacaaaacacaccattcccaaaaccttgcctccttcattttataaaattggtgtcataacaaacaacacttacccataagggtactcaaagccttaaatgacataaagtatttaaaacatttagcctcatacctggcctatagtaaagattattatttttgtttcccttcagttttggacagtaactgggtagtggtcctggtaggagatcataatgtagcgattctttttttttttaattttttttaaattttattactattatactttaagttttagggtacatgtgcaccatgtgcaggtttgttacatatgtatacatgtgccatgttggtgtgccgcacccattaactcgtcatttagcattaggtatatctcctaatgctatccctcccccctccccccaccccaattcttcattgcctattgaagagagagcggaatgctttggttgccagatatggaagcagaattgctgacactttgttatccaaaccaagaggcctgtcttcaattttcatgcagataagcaggaggagggggaatcacccaacatctgtagagagctggaccacaggaatagaaacagaattgtttaagagaccaataccaagctaaatagttagtgtaaccagtgatgaaacaaaaatcaccacatccattaagaaagaacatttatttcatgttttttgatcatggttctggagaactatttaatgtatattttacctggaaagacactgtataattcaattgtatatgaatttcatattgtataatttatttgtatgttttcaaagctataataccattgggttttaaagtatttcataaagctgtcttaccaatcttagttgatgaagtaaaacgtattgaaggtattattgactctgttgaagcaaagagaacaaaacatacggtttttacctaagaaagacgtttttgatttttttcagacttctctggctccactaccctgctacgtttatctgattgagcatccttccctcaaatatgcgaccactcgttccatagccaagtatcctgtgggtaagtcatagttcccactgtcataactcaataaaatatgtcctagctgaaactcagagaaatttattttttatcttattttatttttgagacagagtcttgctctgtcacccaggctggagtccgatggtgtgatctcagctcactgcaacctctacctctctggttcaagtgattctcctgcctcaagctccctagtagctgggattacaggcatgtgccaccctgtaatttttgtatttttagtacagacggagtttcaccatgttagccagggctggcctcaaactcctgacctcaggtgatgcacctgcctcagcctcccaaagtgctgggattacaggcatgagtcactgcctggccgagaaaattatttttaaaaaaacatttacagctaccttccatatccttaggcttataattgtcaagtaacaagcaatttagctccaggcaggctctaattgtaccgaatttccccaatttcactgagcagctttctggttttgttcatgttccctttgctgtaatgcttggcccttctatttagtctggcacaattcttctcattctcaagattcagttcacctgtcacctcctatagaactttccctgaccctcctctatagcattaattactccagaaatgtgtacatttgactaatatttatagtgtgcctaccagagaccaaccctgtgctaggtgcgggggacagaacaatgagcaagacacacagtctcccctcaaacagcttcgtatgtgatgagaaaacagacaggtaaccaggtaatcactgcacagagtgataaatgctaaataggggcaattacaggagactggaagagcaggaaagacctaacccagtcttgatggatcacagaaggcccaaagaagtgggatccatcttgaggttgtgtatgtgtatgtgtttgggggaggaaaggaaaaaaattgagagcagtcaacaggattctagacaagtgtcttgaaattatctgtgatgaaaggccattgctgatttccaatctgctatagagcaatacttttgtaaaatgtaatttaaaaatggatttctagaaaaacgatcacatacttgaatattttagcaatgtcaaattgctataaaagtttctaaacacttactttaatttctgtacatatctcgcctgggaccagcagcagacaattggtggaccagtccctgtcctcagacaatactttgaggaaaaaggaatatcatatacaagggccccaaacccctaactgatgacatgccatacttgatacactgtgttctccatttatcttagcactctctgttccctatccccttctgcaggctgataatgtatgcttactaaatattagctcaaattaccagtaagtacacaattctaacttataaatgatcatcattcacagtagggttttgttttgttttttttctggaaaagggtctcactctgttgcccaggctgagtgtagtggcacgatcacagttcactgcagccttgacctcctgggctcaggcaatcctcccatctcagcctcccaagtagcttgaactacaggcacgtgccaccacattcagctaattttttattttttgtagagacaggatctcagtatgatcaggtctcaaactcctgattcaagcgatcctcccaccttggcctcccaaagtgctgggattacaagcgtgagccaccacacctgtacctcattcacagttttaatcacacctatcccacacagacttatacaaacttatccattccttcccatgcaggttctataactataaccatatataaaatactagccaaccaggagaatcgcttgaaccccggaggtggaggttgcagtgagccgagatcatgccattgcactccagccggggcaacaaaagtgaaactccgtctcaaaaaaacaaacaaacaaaaatactagccatctaacactggaaatacatacattcatgagcttgtccggagtgatcagatttgactggatcagaaaggcaagggatctgtttctccaaagtgcttgtgctaccagtgacctactccaggttgttttctgaccctctccttatcaagacctgtcaaagatctgagaaattttacccgacttacaagctaaccattagcctagcacctctgagtggatgccagtagaagacacaagactcctaaaacagagacaaagaatagattattgacagtagtaatagcagagtgtcagcatttctgcaccattacccaagctccagttcccacagggtgacatagagagagccagatggcagctatccatgccagtggttgcattctaggagggaacctttttttttttttttgagacggagtttcgctcttgttgccaaggctggagtacagtggcacaatctcggctcactgcaacctccgcctcctgggtttaagcaattctcctgcctcagcctcctgagtagctgggattacaggtgcccaccaccatacccagcaaattttttgcatttttagtagagacagggtttcatcatgttggccaggctggtttcgaacttctgacctcaggtgatccacccgcctcggcctcccaaagtgctgggattacaggcgtgagccaccgcacccggctgtgaaccttcatttttataatgggcagtaggcacgagtgccctttgctccagggaagaccccattcctaacttccaaggctgttcactatacagacatccttgaaaagatcatctggaacaaaaatagtccgtgtcttgctcatgagacttgcagatatgcagaagatccatgaagaatcctctctccacatccctcttaccacctgctttgcaatagacatttcacgagctgtttgtcatctattcacttgtttatcctgccagttactaggctgtgacttcatctttaccttctggtaacttccaacatgcagccccacactctcacacaccctctcaaacaccctctttcttctctagtccattctctttcttgagcgcctcattagcataattaattatctgcagactacactacaattaaaattacaacttaaaatattttttgttaaatctcagatggtttagccaggagtaatgtaatttaaaagcaggttggcaaacaatataaataaattaaaatctaaaattattctggaaattcaagtagtgatacttttgtgcataataaaaggatctttatatgccatctttggtggccctattgtccaaaccaaaaattaatttttcgatacaagatctcatatcagagcagaatatttagattgtaggacatggctatggcagagtcaggggtggcgttgaatgaataataattacacaaataactttcctaagtctcaaatgagaccacggttaatctgagaaagttaggagagggctgtgtccagtcgctttcccatatttgtgtgtgtgtgtgtgtttatgtgtgtgtgtgcgtgtgtgtgtgtgatcataagagtggctgcagcaaactgcttctttctaggataaggtttgcctagaatgatcctgtcacatttcttcttccttgagaacagagtacaaaggtggtccttgtaggtgcctactagaagttaaagcaaaatttgtatgcagcaatattcttagtgtattataaaatgttgactcagaaagattgtctctctaatgttaaacatgcttttttcccagtgagtgcatgatataaaatattccaaataaaacagcaaagttggaaggagaacatataacatttctaattatttacaatgagcttaatactccctcatattgaaatattttaaagatttggctcaacttgtaagggccaaacatatcagcaatgtttgttctggctaagagtagcattgcctacaaatatcatagcctaagattgatatttgagagtttggaaatcttaagcttttatttggtgtcacagagaaacaggatctgtatctcttattgctaagcctttgatttgtttcagctaattgcctgtatttggatatttagcttactctaattccttacttcaagtattgatacttttgtgcataataaagattccttcattcttaaatcattgactaggggattattatgattgacttaaactattcaacatttactcttgaaatggagagaaatttacctaccttgaagattggaagcccaactaatatcaggattctattagaaacaggaggaaagtgaaatggatttggggtaggcaaacgacaatgtattctatagtattcctacagacatatctacaaacacactttttcacatatttgtgtaagtcatttatgcacagatgcataccttagccacatttatgacaccatatacttaaatatatgttcatacatatatgcaagaaacctaagcacaacaaataaaaaatgatgcaagagaataagataagattttgtgtattgggaaataacagaagcgggtgaaaacaagatgagtgtaaaagaatgcagtatgttaatgggatggaagagaatgagggtagtgcagttggggtaaatggtttgccaaatagagaaggtgatgactggggagatgactttgtgggagacttgaacaggaaggaagggtctacaaaagtagtttaaagaaagagtattttgtagatgtaaggatggatgcttaacagccacacaaagtagacctaatagtacaggcatcatttcatatgagttagaagaaatgaacacaagttttttcctgcataaaattaaaaccaggccaagcacgacggctcacgcctgtaatcccagcatttggggaagccgagaagggcagattacctgcggtcaggagtttgagaccagcctgaccaacatggtgaaaccctgcctctactaaaaatataaaaataagccaggaatggtggcccgtgcctgtaatcccagctactcgggaggctgaggcagaagaatcgcttgaacctgggaggcagaggttgcagtgagcagaaatcacaccactgtactccagcctgggtgacagagtgagactctgtctcgaaaaaataaataaataaataaaaccattgcactattgtgttaggatggattgctaggttaagggcaaaatcattgctcaagggtcacatagattgtcatattgactgaaatccatgattcatctagtctggatttctgtgaaatctataaaaatagatgtccttcctcccgtcacagctaaatgttagatcttaacagtttctcttcaggtccacctattattttgtcagcataaacttgttcaccttttttactatgttatgacttttaaatattttagcaatactgaaggaaatttaaagaaaaaagaccacaagagtttcctatttctaacaccactgattttttccatgttctttcccagtctttattcactatgcatctaacttaaacatgtaaatgttctgcttcacgttttgccaaacattatgtctcaaatattttccatgatgctacatggtttacctttttaataattttaacaacataattctaaatcttgatacattaaaatgcttagttttataatatattttcatacttatataaatgtgactatctctccttctgtacctaggtatagaagttggtcctcagcctcaaggggttctgagagctgatatcttggatcaaatgagaaaaatgattaaacatgctcttgattttatacatcatttcaatgaaggtaagtaataatgaaggtaacgttatcaaacttaaccaccaaacatttaaataacaattggaacctgggtcagatttgccatgctaaagatatgaagtgctttttaaaatttttattcacttcagctattccccaatggccaggatagacacattcaagaaaagcagctgccaaataaagactccacattaaatccttatttcctgctaatctccattttaaaaagaaaagacgagaaaatacaaatgcccagtaaacatatgaaaagatgttcaacatcactagtaattagagaaatgcaaattaaaataagaagtcacttcccccattaagttgggaaaatattaaagtctgcaaatatcaagcgttggtaaatgtgtaggaaaaggggaaactctcattacctgctggtgaacatataagtgaacatataagttggtaaagacattttagaggataatcttacagcatccacttcttaaaacacaccaatcttattacccagcgattccacatctcaaagaaacacaagcacaagcaacatgttgtttacaaagattgttatcgtgcatcatttataacagcaaaagaatggaaacagcatgaatgtccacctgttggtggagagttaaataaactaacatggaagaatcttcaaaacacaatggtaattagcagaaagcaagttgcagaccaagacattcagtacaccaattggctttaaaataacaataataatcatcaccttctaggatacatatatatgttaacacatcacagggaaagtcctagaagaaaacacaccaaactgataacaatagttaccggggacgggaggcaaaacccaggctaattttgtcttaattatattcaataagaataatgtatttatgtattatttctgtaattaaaaattaattaaacggggactggtggacaaggtgggtatatgcagctctatgcactatctgctcatttatttggtaaatctaaaactgcactaaaaagtctattagttataaaaaaagtttactttaaaatggaaaatagttgcttaaaatcaaagagacattctatgtaaacaattattccaacagactgagttgaaattgttgttgaggaatgggcaattataataacagagggggtgtgtacttcggtgtctgtggggagtgaattcctcaacctcagatcgtgcgcaccccactgcaatcacagacattcgttttgtgcttgggaatcctttgactccaaaatcatgaaaactgaaaatttgctttttaccatctttgtctgagggcaggttctatactgtctaatggaactggttttgagaagatcacaacatacttacaataaaccctctgaataggaagtgtgggactacaatatattaagaagtgatacattcagatagaaggccacaaatctgggtggaaaacgtggttggttttcagatcatagtccatagaatcctatcacaacggtggagaaaagcagttcctggaacaccccaccccttaaccccttatctctgcttcaaccagagctcttctgtgtaacatttcatttaagcaaaggattcggcaaatcaaaaattgtcaaccacgattaatttagactatccagcttggtggattttcaactgagcactcctatccacagaatgctgacaaatgaatcatagccgccatgtgaaaagtctgaagaagtgtgtagaagggcttcattcttgactctgtcctactcagaactgtagttagtgacttggataaagacatatgcgacatgcttagctaagtgacaggtctcaggaagatagcaggaaaacatcctggttgagaaggcagatccaagaagtcctgacaatctttaacaattgtttaaaccaaatgtttaaggttaacaacatcagggaccaaagttttgttcttatgtttaaaaaaaatcccagaataagggaggtaatggtcttttttttctgccttgaataaacaacacttgagaactgtaaataaattctgagtccgtaatccaggagaaacatctataaagaggaatttagccaaggagagcattgagaatgttgaagagcttgaaaatcataatgagaataattcctggccaggcgcggtggctcatgcctgtaatccttgcactttgggaggctgaggcaggcagatcacttgaggtcaggagttcaagaccagtctgggcaacatggggaaaaccttgtctctactaaaaatgcaaaaattagctgggtgtggtggcatgcgcctataattccagctactccgaaggctgagacatgagaatcgcttgaaccaaggaggcagagattgcagtgagccgagttcatgccactgcactccagcctcggtgacagagtgagactgtctcaaaaaaaaaaaagaaagaaagaaagaagtctacattagaaagaaattcaacacattttctgtgacccagagggcagaagagaatcaatgagataaagttatctagagacagaaatttttttcttttgttttcttttttttttttttttttgagacagggtctcactctgttgcctaggctggagtgcagtggtccaatcacagctcaatggagcctcaagttcctgggctcaagcaatcctcccacccagcctcctgagttgctgggactacaggcgtgcaccaccacacctggctaatttctgtggtttttgtagagacagggttttgccacgttgcccaggctggtcttgaactcctgagctcaagcaatctgcctgcctcggcttcccaaagcattggggttacaggcctgcgccattgcgcctggcgagacagaaatttcttattaaaaaagctgagcagcaatgaaacgggccacactttttgaggctgtaagaagtcatcttctgcatctgtaagatggccagaacaatacggagaatactcaaacatagatggaagttaggctttcaagactccttccaactgtaagtagcaaaaacatactcctttgtgttctatcagtttttactttcttcctatccaactttttggtttaaagaaatgagatctggtaagttcccatcttcatcttggaaggtgtggtagattttaattcttccctttcccgcgtccacatcctggcagtgtgatgtttcatatccttctgttcagagatagagtctatttttccacttctggaatagctggcttgcccatgtgaattgttttgtgccatagaagaggcttgaaaagcacttgcacattggagcttgctctcttcctgctcttggaaaccctgtacgtgtaccattatgtacaacagcccacattggcctgctggataatgaaagcctttgaggtggaaaactcaggcaccctaacagacagagtcatgcaactccagctgacagcccatcagacataacagtaaggccatcccataggatccagcctccaggtgagctgtcagcttaccacaaaggcaggagcaaaacaataaaaaaaatccacaaagccagtgtagacggaagaaactttccaaccaacccacagaatcatgaactaaattaggaggtggttgtttgaagccactaaattctggggtagtatgttatgcagcagaagctaactgatacagaagtgatcactgggcatacccattctaactctgctctaaaagcaaaggaaggctttcctttgagttgtgaccataacacgctgtgggccctacattggaccaaacgttcatcctgtttgctcagagatagcctggtatatgcataaactactccttttccaagtttctgggaattgggttgaggttgctgcatctttggaagttggtctccaccactggcaggctgcctgcatcacaagatctcattactcaggagctgtccaagtgtctaatgtacttagttaagaaaaagaggctgggcatggtggctcacgcctgtaatcccagcacttggggaggctgaggcgggcggatcacaaggtcaagaaatcgagaccatcctggccaacatggtgagaccccatctctactaaaaatacaaaaattagccgggcgtggtggtgcatgcccatagtcccagctactcaggaggctgaggcaggagaatcgcttgaacccgggaggtggaggttgcagtgagccaagaccacgccactgcactccagcctgggtgaaagagcgaggttccatctcaaaaaaaaaaaaaaaaaaaaaaaggaaagaaaaagagcacgatactgaagtcacctcagttgctggaactcctcctgaaaatatgcagtcataaaacatcatagctggaagggtcctccaagataagctaatccaataccttcatttgacaggtcaagaaagcgagcctcaagaagttaagcatcttgttcaaggccgcatagccaggggattagagcccaggtctcctgacccctaaacctagattctttttctctcaaactggctttttcagttctgttttctacctctggccgtcggcgtgtttgtggacagagtgctgataggaatcattcaaggacatcttttggcctagtgctgtttatgaacatccttaactaaacgttatctgttctccccatagctgtcttcattttgttattgttgctgttgttattattgtttcttccttacattgttaacttccctttttccagattttttttttttttttgagacagagtttcactcttgttgcccaggttggagtgcaatggcttactgcaacctccacctcccaggttcaagagattctcctgcctcagcctcccaagtaactaggataatcccaacctgggtatttttagtggagatggggttcaccatgttggccaggctgttctcgaactcctgacctcaggtgatccacccaactcggcctcccaaagtgctgggatgacaggcatgagccaccacacccggcccagagatgtttttagttgccattgatacatattgtttttgtcataggaaaagaatttcctccctgcgccattgaggtctataaaattatagagaaagttgattacccccgggatgaaaatggagaaattgctgctatcatccatcctaatctgcaggtaacatttgttctttctttaaaatgttgaaaataataatgctgtacctttgaatagaagtttatagctcatacagcacttcgcgtacattcgcccatttgatgctctcattagacactgagtgtagatagggaagatgttcggactgtcgctcaataaatacttattcagtgtaacctgtgctggctgtgtggacacaccagtaagtatggcctgcacgctcaatggaatttatagtgtaggtacacaaaagtctaactttagtctagaaatgaagacagccagatgagatgacagaataatgagatgggagaggagtggtcagacaaggccacttagagaaagtgaaactcctacccacattcagcgggtgggaattatgatgtctattttaatataaggaaatacagggacggaagttagaaccttcccacagccatgtagctatcaatgacagatccagagttagtgctctttcaagttggccgcatcacttgctacctccctgtgacagaataagttagagaaaaacgactggaacctctttcttctgccaccattccccaactctcctcagaacccccagaatctactccttgcctagttttatcaataatgacatagtgaagaaggaaaaaaaaaaggctcttgagagaatgtaggaggtttaaatccggaaaaggcaaagggaaaaggagagaagaacagatttccaaagccaaagtatccattccccagtgcaagtggcctgcacactcccagacctcagagatggaagagaactggtggattatctagtccagggctttcaaccccgactaacctttacctagagagcttttaaaaaacatcataatagcaatggcaggactccactctgagatactctgatctttttggcttggataatcaggattgaaaaacactgattgatccagttcctatccctgtttagtgactctaatagtcatccagacttgcaactgaatgaagtggcctgcccagtaatacagacgagtgaagcaaatcctgctttgtggcttaatgggacccaggtggaaacctgaagaagcagccttaggcagtgtttgtttttgtttttgtttttgtttttgtttttgttttttgagatggagtctcgctctgtcgcccaggctggagtgcagtggtgcaatctcagctcactgcaagctccacctcccgggttcaagcaattctcctgcctcagcctcccgagtagctgggattacaggctcacgtcaccacacccggctaacttttgtatttttagtggagatggggtttcaccatgttggccaggatggtctcaatctcctgacatcatgatccacctgcctcggcctcccaaagtggtgggattacaggcatgagccaccttgcccagccttaagcagtgttttaaaggaaaggtaaagactgggggagagaaaggaagaaagcactattggtgacaaaaatatcaagtacaagaaacagaggccaaggtgatgatatcatggcaggctaaaacaggatttttcaggttttaggatactcttgaggagtacaaaaataatcccaggcagacggagaagtgagatgaatgagatcagtagcaaactgggctagtggtaggtctcgaaagttaggaaggatggttttgatttgacagacaataatgaatggctcagtattctacaggagggattgattggttaattctgccaacaaatatttttgaatgacaactaagctcattctgggccttgagattcaagatagggaaggttcctcatggagcttccatcccaatgggtgaggagaactgaccatgaataagtaaacaatatgtaaaccaaatcatttcaaactgtaataagtgctgtaaaagaaatacacaaaataatatagcagagggtataacaaagggttccaattagacggagtggtcacaaagtgccatctcagagatggtggcactgaagttggaacctagaagatgagaagccagccatgtggaaggcaagtgagaggccctgaggctggaacaaacttggagcatctgaggaacagcaagaagacccatatccctggagaggaggagtgagcagaggacggtagagcctggagaaaacacagttcaggacccggttatgagtctagattttgtcctaagaatgacagttcttactaagggatgctaactggaatcacgtaggggaccccctcccagtgcctagaacccaccacaaactactaaagtagcgcttctcaaacttgagccacatgacaattatggggagctttttaaaaatgctgattcctggccaggagcggtggctcacgcctgtaatcccagcgctttgggaggccgaggcgggcggatcacgcggtcaggagatcgagaccatcctggctaacacggtgaaaccccatctctaccaaaaatacaaaaaattagccgggcatggtggcaggcgcctgtaatcccagctactcgggagcctgaggcaggaaaattgcttgaactcgggaggtgaaggttgcagtgagctgagattgtgccactgcactccagcctggacagagctgagattacgtctaaaaagaaaaagaaaaaatgctgatttctgagtcctcttcccaggggctctgatctaattcatcagggtgtagacagggaatcaattgagttcaccaggtgattttcatgtggctcaggtctggatagcactgcacaatgtcggaatctccacaggtggggctagccagacgtgtgttgaagaggttcctttagtgattctggggcaagtctctgcctgaaaaaccaccggttcagagaaatagttctcagccgagccaccctgtaaatcatctggggcctaaatacaataaacacagaaaacagtgaactataaatgggtagcatgagggattcgaggaggtggctgaaagaagcacgtatcctgatggcatggttgcgggttatatgactccatgctctgcaagtcagaactcatagaactgcacacaaaaatgagcgaatttcactgtaggtaaatttaaaaataaaatataaaaataatgatgcctaggccctcctctcagattctgatttgatttatctgaaatgggccagcccctctacctgtatatatgtatttaacatcccaagcgatcataatgtgccaccaggatggagaaaactgcggtgatgcggcacttcccaaacactaatgtcgtgcacgtgaacgtcaaggacctgttaacatgaagattttgatttggtaggtctgctgcgcataatgaaatcctgcttttctaacaggctcctgggtgatgcggatgctgctgggaaatgttagacatgcagaatcccaggcccccacccccaacctatagaatcagaatcttcatcttaacaaaatccccagatgatttacaagcacctcaaagtttgagaagaactgttctggggttcccgtggtgtgacagccatggtgcttgagggctcaaaggtccaaatccctggtgcgggacccttcagataactcagttgttaccctaatgtaggagcacatttggaatacacccaccttgtcccagactctccccagcccagcaccaccttctctcaccaatccccgtcagaatagaatctccttgtatgcaggtacaacatggctcatttttatatttcccaacggtagaatgtcttgcacacagaagactcctaatggatatttcctaaattttgctgaacagaatttaacttgagctggcaacaggcagactatgcacttaggtagacatgcatttagttttgccttttaatattataaatctctttggctacattcaaggtaaacctggtattgaagcaaactcttttttatttttttttagagacagggtttcattctgtcacccaggctggagtgcagtggtgtgaacatagctcactgtagcctcaacctctgggggcttgagcaatcctcccacctcagcctcctgagtatctgggactacaggcatgcaccaccacacccagctaatttttcgtattttttctagagataggatctctgtgttgcccaggctggttttgaactcctaggctcaagcgatccacccacattggcctccccaagtgctgggattacaggcaaggagccactgcacctggctgaagcaaatgttaattacacgtttcaattatacaaatgcaaaggggaactcttaaaactactgccaaaattcacgacccaatgtcagcgcagtcagatcacttgcctgcatctcaatgcctcgctcaagtatctcttttaaaacaacagaatactgtaatttgttagttgtctagagtctgacataaatttttagaggagaaaaaccaaatataatatatttattttgattgtttcctgagaggatcaagactggaaaccactgcatcctggggatcccatgtttttaactcttgatgggaagacgatcccactgggcggagactgtaccgtgtaccccgtgtttgtgaatgaggccgcatattacgaaaagaaagaagcttttgcaaagacaactaaactaacgctcaatgcaaaaagtattcgctgctgtttacattagaaatcacttccagcttacatcttacacggtgtcttacaaattctgctagtctgtaagctccttaagagtagggttgtgccttattcaactgcatacatagctcctagcacagtgccttattcggtaggcatctaagcacatttcttaaattaattaatatatctttaaagatatcatattttatgtatgtagcttattcaaagaagtgtttcctatttctatatagtttattatacatgatacttgggtagctcaacattcttaataaacagcctttgtattcagaatataaaattgaaatagatatatataaagttatttgttttattgtgctttgccttactacacttcacggatactgtacttgtactttttttccaaattgaaggtttttggcaaccctgtgtctagaaagtctaacagtgccatgtttccaacagcatgtgctcactccttgtctctgtgtcaccctttgataatatttcaagcttttttatgatttatttattatatctgctatggtgatctgtgatcagtggcctttgatgttactgttgttaagtgttttggggcaccatgaatcgtgcccatgtgagactgcgaacttagtgaatgttgtgtgagttctaactgctctactgaccggccatttccttgtctctctccctgtcctctggcctccctgttccttgagacacaataattaataagtctacagcagactctgtgtgttcaagtgaaagaaagggtcatacttctagaaattaagcttagtaaggaaggcatgtcaaaagctgagacaggctgaaagctaggcctcttgcactggttagccaagttgtgaattcaaagaaaaggatcttgaagaaaattaaaaattctactccagtgcacacacacaaatgataagaaagcaaaacaaccttattgctgatatggagacagttttagtggtctggatagaagatcaaaccagccacacattaagccaaagcatgacccacagcaaggccctaactctcttcaattctgtgaaggctgagagaggtgaggaagctgcaggaagctgggagaggttggttcacaaggtttaaggaaagaagacagctctaaaacctacaagtggaaagcgaaccagcaagttgctgatgtggaagctgtagcaagttatccagaagatgtagctaaaatcattgacaaagatggctacactaaacaacggatcttcagtgtagttgaaacagccttctattggaagaagatgctatctaggactttcctagctagaggggagaaatgaatgcctagcttcaaagcttcaaaggacagcctgactctcttaagagctaacacagctggtgactttgggttaaagccaaagctcattaactgtttcaaaaatcctaaaactcttgttttttgttttttttttgagacggagtcttgctctgtcgtccaggctggagtgcagtggcgcaatctcggctcactgcaagctccgcctcccaggttcatgccattctcctgcctcagcctccccagtagctgagattacaggtgcctgccaccacgcccggctaattttttgcatttttttagtagagatggggtttcactctgctagccaggatggtctcgatctcctgacctcatgatccgcctgcctcggcctcccaaagtgctgggattacaggcatgagccaccacgcccggcccaaaaatcgtaggactctgaagactgatgctaaacctgctgtgtctgagctctataaatggaacaacaaagcctcgctggcagcacatctgtttgcggcatggtttactgtatattttaagcccactgttgagacctactgcttgggaaaaaaaaaaattcctttcaaaatactactgctgattgacaatacaccatgttacccaagagctctgctggagatgtgcgaagagattagcattgttttcgcgcctgctaccacgacatccagccgaagcccatggatcaaggcgtcattgtgactttcaaatctaactatttaagaaatacatttcaggctgggggaggggagaaaaaagaaaaaaaagaaaggaagaaaaaaatcatttcataaggctatagctgccatagatagtgattcctctgatggagctgggcaaagtaaacagaaaacctctggaaaggattcagcattccagatgccattaagaacattcaggatccgtgggaggagatcaaaatatcaacattaacaggagtttggaaaaagtgaattccaaccctcttggatgactctgaggaattcgagacttgagtaaaggaagtcatgcagatgtacagcaagagaatgagaagtggagcctgaagatgtaactgaactgctgcaatctcatgatcacacttgaatggatgaggagtcgcttcttataaatgagcaaaaaagtggtttcttggctgcaatcaactcttgttgcagatgctgtgaacactgttgaaatgacaaaggatttagaatattacgtaaacatagttgataaagcagcagcagggtttaagaggattgactcctattttgaaatgagttcggctgggagaagtggctcatgcctgtcgtcctagcactttgggaggccaaggcagacagagcacctgaggtaaggagttcgagaccagcctggccaacatggtgaaaccccctctctactaaaaataccaacatattagccaggcgtggtggcacgtgcctgtagtcccagctacttgggaggctgaggcagaaggatcacttgaacccaggaggcagaggttgcagtaagccaagactgcgccactgcactccagcctggtggacacagcaagcctccatctcaaaaaaaaaaaaaaaaaaaaaatgagttctactgtgaataaaatgttattaaacagcatttcatgctacagagaaatctttcacgaaaggaagagtcaatcaatgcagcgaacttgttgttttattttaagaaattgtcacggccatcccaaccctcagtgcccaaccaccctgatcaggcagccatcatcaaggcaaggccctccaccagcaaaaagatcatgaattgctgaaagctcaaatgatggttagcttttttagcaataaagcatttttaatgaaggaatgtacatgttttagatataatgctattacacatttaacatactacatatagtgtgagcataacttttacacgtactggaaaatcaaaaaatatgtgtggctcatctgttataatgtttgttttattgtggtgatctggagccaaggctgaaatatctctgaggtatgcctgtaatgtataagtgctagtagaaatgagttgtgcagaattgctatttttttcaatttttatatttgggttaatggtaatatactaagcgtccagtctataaacttcagcattcgttgcgaaatccagaggagacttttaagtgctgttttgtagatgaaatatgaaagagaaacaagggcttaatggtaaagatgacatatgactatattaagaaactgaatggccctttgtccacaaacagtaacccacacagcattgctactgtggcatgcccactgctctgcactgacctcatggagcagagaacctccttcagacacctcacgcaccccctgaggagctaatgtttcttcccaacatggaaaatttggaagaggcctattcttcacagctgtcacttctcattttgaaagaatatgcccacccttattcgcaggcaaggtgtgaggaggtctttgggctccagctgttgccagcagaggtggtgaaagtcaacaacagggcactggacacacatagaaatgtgacccacagctatggtttgcaaatacagtctttcaagaagtcctgccatgtcctaaatgcccaaaccccttgcctcccatgattcttctcctcaaaggaccttctgctggacgccgccccctccctctccagccccaccagggccctccccgccatcctcttaggccacagcagccaataaagagtgtttttattccatgatctgtacccccaatgaatccataatcatagtttcaaatgtatttaccaaaaatactaacattatctggaatgaatgaatgaatgaatgaatgaataaatattatatatttatacattttcattcttccaaagtgaaccccactatgccagttttactccatactcagtgttctggaaagcccatattctttctaaatttttcagcatttttttctatttttgtactttaccaaaattatttacattggaataaactctcttccttctgaattctgtagtaaaaatgtgatttatcagcttttgtacataagatttaccaagcttccttctcctgctgtgaatgttccgttgtgtcctatttctgagtccaatttttctaggtcagctttttccagatgaaaattttggcaagaatattcttccctcaaattttagttatttgtaaaatttacagtgtacaatttatatcactgtggtttcagtgggtttcagggttgattattcctatcaagtctaatcttcccttttacagtctttaaagtttctaattagatgtgtggttggtttgtttgtttttaatctataacatattgctgtgtggttttagccactttgagttttattttactttgattatttctaacaatctacatttgcatttttctcatttataaaatgggaatgataataataatagtgcccctttcatggggttactgtgaggattaagtgggctaagacatataagcacttagctcagtgcttagcacagaatacatacttaacaaatcactgaagttcaaattcctagcacaaaaggcccttcctgatctgccctccctccccgacgcctccctacactcatctccctttgggccatctccactccagtgtccttcccactgtttattcctctaggcctttacatagactgactcccctacccagaactctcccccactgtcctccacctcccaccccacctcagactgcgctctagccaataatgcctttttctccttcaaaatgcaacccaactttcatttcatagccaacatggtcttcgtcgacctgactttgttgccactttgcccctccttctatcccatcttgagggcatcagcagtgtctttttcgatgtctacaatctagaaagtgaccaatagaggtgagttgaataaatgagcatgctcaaacatcccttctctactggaacatcttcatcttccaccaatggccctgcctttctttttatcttccttcccagtcacctcctgagaactgtccccatcactcccaagtgaaacacttcgttttacaccctccagactgttactatgtcccaaaggacagtggaaggaaaaaacaaccatttaagtctgcaaatccatgggaaaaaaaaaaggaaattttcttttcttttttttttttttttttttgagatggagtttcactcttgctgcccaagctggagagcaatggcatgatctcggctcaccgcaacctctgcctcctgggttcaagcgattctgccgcctcagcctgttgagtagctgggattataggcatgcgccaccacgcctggctaattttgtatttttttagtagagacggggtttctccatgttggtcaggctggtctcgaacccccgaactcagatgatccacccacctcggcctccaagagtgctgggattacaggcaggagccgccgcaccaggctaaaacaaggaaatgttcacactcaacaattcccctgtttacaatcctttggtggcttcttacccttgttatgagatctcaaagcctcaccacggctgtccaagtcctacatgcactggcctctgcccacccctctagccttatttcatgtcacttggccccttgctcccagcaatttggccacataagacttctccagtcctcagatgcacaaagttccctaccacctttgcccacattttcccacttactgaaacgcttccccatctccacacttccattagctaaatgacgctactcttaaacatgactcaggctaggttaggccactctgttatacaagctcattgccagtactagactggcacttacccaaattgcaaccgtaatgctttatgacaccggggcaggtgaagttattgtctgtctctgattaaactgcaaaagctccaagaaagcagggatagcatttgtcttattctttgtcgtacacacagcacttcacgcatagaaggagctcagtgcgttttgctggataaatgagagttgctctgctgagtgtgaagctatctggaagggcttctttggaagagcgggttgtcacttccctcacaagggtgaccccaagatagccactggagaccacagagagtgggaatggtgaaccacatacaggcagtgctccaataggaggagcaaatgaaaagtggcagctggggaaaccctgaagcctgagagtcccatgggggtgaccagggagagaggcctatacgggtcatggatgttccagggcagcaggaccagggagcgtctgaaggcccatatttgcatatccgacaaaaacagagtctggagggaaatagctgcttaggggttttttgtttgtttgttgttttttgtttttttttttttgtttttgagacggagtctcactctgtcacccaggctgcagtacagtggcatgatctccgctcactgtagcctctgcctcccgggttccagcgattctcgtgcctcagcctcctgggtagttgagattacaggcatgcgccagcaagcctggctaatttttatatttttagtagagatggggtttcatcatattggtcaggctggtctcgaactcctgacctcaggtgatccgcccaccttggcctcccaaagtgctgggattacaggcgtgagccaccatgcccggctgcttttctaatatctctatacttcccacacatactgccttcaagaggcttgtgatctacctgtagagacctttgtatgcctgttcccaaagcagacacaccaaaaaccctagtctagtacttggcagacagtagttcctgaacacctaccaagccgatgactgagagggtcactcagagaggacttcgcccagggctgccccatcaggcttggtgggttgcacaatatgaaactccagggaggtacctgcacacaccacaaagtcaatggcacagcccagaagcttacatcccatcaaagcaaaaacagcactaaagtttcccccattctgccaagaaaagaacaggaacttgactagcaaacaaagtcaaccaaaaaactgaggtctataggggattaatgtagtataattaaggggaaaaaaatactaaagccccattagctacagatagactaaatgtttaacagaaaaacgtcatttttagaaactacatattaagggaaagaataactttcacagtcttgaaacataagaaagctcaagagcatagagagcatagagagaggtccctagacaggagttttcttgctctaagtgaaaggcagggccacgcacagggacctgtaatcccagcacgtcgggaggccgaggcaggtggatcacctgaggtcaggagtttgagaccagcctggccaacatggtgaaaccccgtctctactaaaaatacaaaaaattacctgggcttggtggcgggtgcctgtagtcccagctacttgtgaggctgaggcaggagaattgcttgaagccgggaggtggaggttgcagtgagccgagatcatgccattgcacttcagcctgggtgacaaggcaagactctgtcggaaagacagaaaaagagagagagagaaagagagagagaaggaaaagagaaggaagggagggaggaagggagggaggggaggagggagtggggaggcgaaggcaaccaaagcttaggaatgtgggtgcaaataaattcacaggtttggtggtcacaagttgaaggtgtttccaacttatggcttccattttcactgtaaaataagggataaaacctactacagctattgatatggaaatggtggggtcacaggtttaagaagtatgatggttttgaaataacaaaatatgatggttttaaaaaataaaacagaaaaccgatgaaagaaatagaacagctggacagtaacaagggttgctataaacattaaatgagacatgtatgtaaagtgcatggcactttataaatattcatgtccttctcccctcctaccaccatcttaaatggaagaaactgtcttacttatatttgtatcatctatcattgcccatacttcatgttcaatttttgttgaattggttctaaatcttcacacatagtaagtgagatacattttttgagttggactgaatcctttctgcagaactttgctgttactgtcagaggggttgctggtgcagtgagaaaaatggtagttcttgatactagactaactaaacttcagagaacctggatcctccagccaggagaaaggattgtgaacttcgcatgtcattccgtctgtctccaagtctcgatttccctacctattaaactgggatacgacactcaccaaacctacaaaacaataaccaacatgaccggaagagctttgtaaacagtgtagcatacaatctcaaaggctgaacgcattgaaggaatcctttggggaggtaatttctcagagtatcaagaaccataaaaatgttgaaaccaattgacctaggcatctccttcccagaaatatatcctatgacaagggtttccaccctttttctacccgtccacccaaaacatccccatggatggcacattcctaggttttggactaacgcctattaagctaggatgtgaatcacgtacaatccctgtcttgctgccactcaacaagatacatcccagtgaaggaagttattctgggaatcatctgaattaagtaaataattcaccaaatgcagtatttcacttattaacaaattggttgcaagttccacaacccatcaagacaagcagtcaagacttggcattccatcagagaaatgcaaatcaaaaccacaatgagataccatctcacaccagttagaatggcaatcattaaaaagtcaggaaacaacaggtgctggagaggatgtggagaaataggaacacttttacactgttggtgggactgtaaactagttcaaccattgtggaagtcagtgtggcgattcctcagggatctagaactagaaataccatttgacccagccatcccatgactgggtatatacccaacggactataaatcatgctgctataaagacacatgcacacgtatgtttattgcggcactattcacaacagcaaagacttggaaccaacccagatgtccaacaatgatagactggataaagaaaatgtggcacatatacaccatggaatactatgcagccataaaaaatgatgagttcatgtcctttgtagggacatggatgaaattggaaatcatcattctcagtaaactatcgcaaggacaaaaaaccaaacaccgcatgttctcactcatagatgggaattgaacaatgagaacacatggacacaggaaggggaacatcacactctggggactgttgtggggtggggggaggggggagggatagcattaggagaaatacctaatgctaaatgacgagttaatgggtgcagcgcaccagcatggcacatgtatacatatgtaactaacctgcacatcgtacacatgtaccctaaagcttaaagtataaaaaaaaaaaaaaaaaaaaaaaagacttggcattcaagttaagaactgccatccttatgaaatcactcaaaggaatgaagaactgaatatacctatgaattaggctgatcggcaataatgatagtaagaacatcagctctttcctatctattctctcattgcctccttgtgaaaagcctgcgtggtggacaggagggatttataccttctgttctccaggtggaaccatgggtttctattcactcaaaataatttgacagccaacagccatgatggatagagccctcattttttttatttcttccaaaaaaaaaagggggggatacaggtgcagaacatgcaggtttgttacataggtatacgtgtgccatggtgctttgctgcacctattgatccatcctctaagttccctcccctcaccccctaccccccaacaggccctggtgtgtgttgttcccgtctctgtgtccatatgttctcaatgttcaattccacttatgagtgagaacatgtggtgtttggttttctgttcctgtgttagtttgctgaggatgatggcttccagcttcatccatgttcctacaaaagacatgatctcattcctttttatggctgtatagtattccgtggtgtagatataacacattttctttatccagtctatcattgatgggcatttgggttggttccatgtctttgctattgtaaatagtgctgcaataaacatatatgtgcatgtgtctttatagtagaatgatttacattcctttgggtgtatactcagtaatgggattgctgggtcaaatggtatttctggttgtggatctttgaggaatcgccatactgtcttcctcaattgttgaactaatttgcattcccaccaacagtgtaaaagtgttcctatttctccacagcctctccagcatctattgtttcctgactttttaataatcgccattctgactggcgtgagatggtatctcactgtggttttgatttgcatttctctaatgaccagtgatgatgagctttttttcatatgtttgttggccacgtaaatgtcttcttttgagaagtgtctgttcatatcctttgcccactttttgatggggttgtttttttcttgtaaatatgtttaagttacttgtaaattctggatattagacctttgtcagatgggtagatggcaaaaattttttcctattctgtaggttgcctgttcactctgatggtagtttgttttgctgtgcagaagtggatagagcactctttgagggctttcatggcctgaaccactgacattatgtggctgtgaatccctgggcacatcacttcaagcccgtgagtctccttttattgaaactgcttccaaagctgctgagtggttcgaattgactacctgatgtgaatgcgctttgagatgcaaatacgtacaaaggtgacatgccttatggcttgctggctctgttcctaagccggaaccaatgataatgcttcaggtccaaaaacgggccttccctttacccactcctgttaacaacactctagggtttctagtcaatctgcacattggcacacctaacgcaaggataaaacgtggccataacgaggcaaaacaaatatttattagaaatcaaaaaaccatttcttcaatggcacaaacatgttcttactctttgtatgatttctttcttgaacatagagtttcgcacacacatacacactaagaacaagtaggtaaatgagaatttacaaggatccggcacattcaagggagaatggggtgacgattctgtgtttggaaccaagatcacagtaaaaaatatgtaaatcaatgcagaaatcaagtacggcttacaggcccggatgacggcccatctacctgggccctgcccagagcgaaaggtcacaggtcaccaggccttgaggaaggacaggaatgtcaataataaagggctctctcaggctggagccttctaagagcctgaagacttcacagtacaacctccagcaccttctcccacatcccagggaggaaggttaagcaccttttattcctaacagatatatcacataatgtctagaataatgaattcttcctgaggaaaagtttagctaaaggagcatttgcagccaaaggcactatctgaacctgggagaccccatccctggaaaacaccttcccctgaaattactgaaatgtcaatcacggagttttaggatgtcctgatagacccacgggttcaacggggtgtgtgtgggggctgagggtgtgtgtgtgcatgggtgtggttttgtgcacccctgtgggcacacttgaattttcaactagtcatagggaacataggggacaatgttgactgccaaatgagacacctgagaaaatagtcctgccccccaatataagcgaaatacaaagactcaaaatgatggaataactgtgctttttaaaaataaataaataatggctcagggagacatctgtggtccaagaatcaggacactccagcctccacagctctgatatgaccttcctgcatgactttgcccaagtacacattcctctcggagcattagcctctgggcgtaaaatgaaggaagtgctccttttcactctgatgcttcttgacttatggcttcccttggtaaacctacctaggctcagacgttttggctgaaagccttttggggtggacactgttgggaagaatatccaatacagaaaatggtcttgccaacaaattccatccagacccacagacagcagatcaccaaaacatgtgagatgacaaacatccctatggctctccattccccacttggacaaaagctggcaggttaggcaaatagaaatcaataattggctttatccattaacatccgagtcaaagcaactctggatacggctttatccataacagatacggctttatccattaatggatatgactttctccattaatatctgagtcaaagcaattctggaattcccagctccatagtgtggagcttggcatcatgaatccaaaccacttcctttcagaccaagatgtctgttcaggcttaatgcgggtagctaactccagatgtggaatgctgatttgtacaatctccaggctaaaagggaccttaaacttcttccaatgaccattttcaacaacattcctcattaagtgcgcaaccagcttctgcttaaacatctccaacatctggagcagttgctggattctgttgagccaaaatctttctcaatttcctaattctgcccattctgaaacacatctgctcctcctgcctctaggacagttctcctcaaatcttctcttctccagaggcccatgcccagccccgaccactgtggcttagagcacgcgattactccctgggtcagctgggagggcaggggctgctgtggattgtgaagcctcacacaccccagcccacctctccccaatcggccccatcaggggcacaaagtctctatctgtccagctagtctggcacacagagtggcccagggcagagaaactggcccagagtgcactgctaggccccgactcttcagtttgcctcaagccagatgaacttatctatcgccatgttatctgaaggccaaatttctatttctgccatttaagattaacatttatggttactatttttataattccacctcgaacatttttacatgaatcctttcaccagataacggcggcagagtggattttctggtggtttcggccccagtcacctggaaaatccttccgtctccacttcacctctgccccccagactgactccgtgtcatttcagaaagagaacatcagaggacgaggacctaaaaataagctcaaagtcttggcaaatgcttttctctcacaagcttccccttcagcttcaaaattcacagttaaaattaaaaaaaaaatacttcgtaccaaagcagttgaggcattttgttaaattcccccactgagacatactgaggtatgcgactaactgctgagttccaagatgatatcgatcgagcagctgctatttctgcttcagcgaaagccacgatcccagcacacaggcacgcgctactgtgaggtcaggacgaggaaaagagccaggacctttcacccagatcgcggcggcccagcaggacttgcccggagtgtctcatgcagacttttgtgtgtgtgaagaaaagctttttgtcttgctctgggcaccctgaggccaaatatataatacttacatccagccccaaagcccccagtctgtctccacttttaaaatcacaaacttcattgtagtaattttcattctcaactgaaatgtcttttccgtattgcaagttaaaaccctgtgttaattctgctactaaaaacatctctcagcttgagacagtttgaaccttggggtgtcaggggacgttcactccaaggatggtctccttttccccgaagggttccggaagggtgtttccagagcgcattcccctcctcccccaggatatccagcttacctccgtcccccgcacactctgggatgggatcacgggtctcccacaaattcaggcaacccagtcacagcagaagagatggtacaatgtgtgggctggggttggggctgacgggggaagctggcaggaggaaagactcctctccctgctcctcaagactgctgcccctttcccgccatccatctctcccagccaagccgacctgcaattggtaaaaccagaggcttcacccgggacttcaggaggctcccaggctccagactgctgctggctgtaggtttacaccagctgtttgccaagtaacaaaatccaggatgtttcccactcagacaaattgacaactgcccctcagttcagacacccactgagcactgagcacgagggtgcactctgcttctaggccagcagagccggactccaccatccctcaaagcctctctgcacagagtcggtgactccgcctgcagcgccagacagcgcacgcgcacaccagctctgggttccgcttctacaccgaggtttccgggaattcctcgacttcttcaaatgcattgagagtggttttgctgttgttcctggaagaatcttggattttgttgaaatctgctttttaaaaaaatatatattttagaaatatatcactctgcatagtgtgtttcttttttctttttcttttttttcttttttgagatggagtttccctcttgtcacccaggctgcagtgcagtggtgtgatctcagctcactgcaacctccacctcccaggttcaagcaattctcctgactcagcctctcgagtagctgggattataggcacctgccaccacgttcggctaatttttgtatctttagtagagacaaggtgtcaccatgttggccaggctggtctcaaactcctgacctcaggtgattcacccgactcgtcctcccaaagtgctgggattacaggcacgagccaccgcgcccggcctgcatgatgtgtttctatggcttagggctacgccattttaaaagttgtgccaactagggttctaaaagtcagagctggaagagacctaagaagcatttccattcaaccctcccatttgacagatggggaaagtcaggacccttagacttgatctgcccaaggttacatggtctgagacaggagcggacaccatgtcacctcacagcgacagtacctgttcgtcttacaggccccgggtcttcgttaaggaaggagacgtgcgtcttccattcagtccacttcacctcattgatcctgcaaatgtgataatcattcttactatttcaccagtgcctcactgagtactaacaaatagccctgcgtttgggacgtcctggtgtctacacagctccccttctgtctgtcctagagatcaggagcacccctgacccgaggggtcacaccaaagttgttggagtttgaactctatccccatctccacgtccccaggcctcagagaatcagttctccttccattgtagggaactcggaaatcctgcaagttgcccagacaggtgtaaagggtccaacttcagacaacagctgctgtgcctgactggtgacagcccaaggggaagcggggacagacagagggagggcccgggccacgagggtgtgaagattaaactccaagtgtagcaggggttgaggaagcacgaagagcctgtggttagggtcagtgccccaacaagagtgggtggcgtctgaggtgttagaatacaaccataggcattgatgtgacttcaattcacacccagagaacatctctagagtgagggtggcaacatcacaactgtttgttagggtaatgattgcagtcagaaatgatgctttccacggggcgcggtttcagtcagagaagtgggttaaggtatggtcatactccgagaaggtggtctgtaggctcaggcagttgggtcagggtaggaggaggtgggcttatcagaaaaggtgttcatggggccgggcaccgtggctcacgcctgtaatcccagcactttgggaggccgaggggggtggatcacttgaggccaggaattcaagaccagcctggccaacgtgatgaaacctcgtctctaataaaaatacaaaaattatccaggcgtggtggcatatgcctgcagtcccagctaccggggaggctgaggcaggagaatcgcttcaaccagggaggcggaggttgcagtgagcagagatcgcatcactgcactccagcctggaactccttttaaaaaaacagaaaagaaaaggtggtcataggatatgtaaggactttaaaaaaaaaatgcaaaaagccagagatctgtcaaagtagccacgtcactttccatctgccaggggcaaaaggggcctcaagtcacccggggtcacaggaactcacacagggtaaacagcaggaaaaggagtacccagcaggcagatcttccctaaaccagatagcgaacacagagagaccatggaggcacctccaaaaaagcagagagaggggctgggtgcggtggctcatgcctgtaatcccagcactttgggaggccaaggtgggtggatcacctgaggtcaggagtttgagaccagcttgaccaacatggtgaaactctgcctctactaaaaatacaaaattagccaggggtggtggcgcatgcctgtagtcccagctactcgggaggctgaggcaggagaatcacttgaacccgggaggcggaggttgcaatgagccaagattgcgccattgcactccagcccgggcaacaagagcaaaattccgtctcaaaaaaaaataaaagaagaaagaaaaatgcagagaggggagccgctgttggcagtctccttctctttctcttctgaagctcaggaacccccatctcagggcctgcaaccccataagcaaattccttcttccaaggaggccactggaagagacagtagctgtggttatggttagcaagtggcggcactgtttctctaacatcctgtcaccatcctgcccctctctacccaccccaaagaccaccaccccagggcccttctccctttgttaccgcaaacacagtcggaaatcatcctcggccactttgcacagctctcccatccggaatctgctcctcagccattctggtaacattttctcaaactccaagatggtcctggctctctggggacataagcaagtctaaggagtaggcatccacactcacaagcacacacaagggcacacacactgtcggggagcccactccaccctcacctcatgcttaatgcatagatcgcaagggtttggctaatctacagaattcaaagacaaaaaagcaggccgggcacggtggctcacacctataatcccagcactttgggaggccaaggtgcgtggatcacctgaggtcaggagtttgagaccagcctggccaacatggcgaaaccctgtttctactaaaaacacaaaaattagggctgagcgcactggctcttgcctgtaatcccagcactttgggaggccaaggcgggtggatcacctgagatcaggagttcgagagcagcctggccaacatggcaaaagccggtctctactaaaaacacaaaaattagctaggcgtatgtcaggcgcctataatcccagctactcgggaggctgaggcaggagaatcacttgaacctggaggttggagtttgcagtgagccgagatcccaccattgcactccagcctgggtgacagagcgaaactccatgatataaataatatttctgaaagcccaggagcttcctatctgaaagtgctggggtcctggaatcccatagcagaggaccgttcaaacatcatttgtcccaccccctcccaggcttggaatctctctgcagtttcctggccataatttttccagtctctcttgaatagcatcaacaaaccaattaagagggccttggacaggcgcagtggctcacacctgtaatcccagcactttgggaggctgaggcgggcgaatcgctttgagctcaggagtaagcggccagcctaggcaacatggtgaaaccccatctctacaaaaaatacaaaaatgacccaggtgtggtggcgcgtgcctgtaatcccagctacttgggaggctgaggtgggagaatcacttgagcccgggaggcagagtttgcagtgagctgataatcgtgccactgcactccagcctgggcaacagagcaagaccctgtctcaaaaaaaaaaaaaaaaaaaaaaggagggccttaataaagagaaacttccatgtgtgacatcaaagcttttctccctgtagtaaccccatgtacatctgccttccaggaccacagaagggatctgctccctctttcataggttgttctgcagatatccaaaggcacgctcacctttttccaatgagcatttctttttttttttttttttctatttttgagacagagtttttgctctgtcacccaggctgcagtgccatgacacaatctcaactcgctgcaacctccacctcctgggttcaagcgatcctcctgcctcagcctcccaagtagctgggattacaggtgcgtactaacacacctggctagcttttgtatttttagtagcgatgaggtttcaccatgttggccaagctgggctcgaactcttgacctcaggtgatccacccgcttcggccttccaaagtgctaagattacaggggtgagccaccatgcccggccgccaaccaccatttcttaagaggcagtctccagtcctctcccaaacctggttaccacctctgaacccatcctatgcattggtttcctcagcatgtaagaagtgttcaggccaggatagaatagagcagaactgtcacctccactgtcctagacgctgtactcctcttaatgcaacctaaggtcaaacttcaacatccacacatcacactgtcaaccctgagcagagcacccccatgagcctgagtttttctacacattctgttgcacagccacactccctagaccctacactcaaagaacctaggctaaggcctcctcaaacctggccacacactgaggagcttgtgcagattctcaggccccacctcagacccactggtgctgacagtagtcaatgaccacgtgctgaactgagtcccgtggaggcccccacgctggggtctccacctaggctcacctgcaggcgccagatgcgttcgctctccttggagacgttctccacagtctcgcccatcagagcaatgagcatgttgaggaggagaacaaaggtgaggatgacataggtgatgagcaggaacagaaagagaatgggatacttggagttctgctggatgttcaggtcacccaggcctatggtgagcttgaagagttccagcactgcgtcgctgaagctgccgtaggagctgcagtccttgttgtctttgggacacttctcgatcagcgaggccaaggctaagggaacataacagggtgctctcctcagctctctgcctggtaattactctacaagcttgcgtgtatttgcctacatgacaagcctgctgcctccttctctctggccattaaatcccatctccagtttcaggtcctctcaaagcctcatcaggctggcttctctggcctggcctcctgcagaaagcccttccacctaacaaagcccagagtcttctctccttcctttaccccgcagtctgcccttgatcacttgcagccttgcagagccactaattataatccatgtgtgtgtccctggctccccagctagtctttgagctcctgacttcctctagcctgggtcacctccctcaaggctgtaagatcctgagtctcctcctaatgctctgttttgagttccctgtgagcaagaccaggctcacacttcccttctttccaacacaccacagtagaggttcactgctgaatggttggatggatggatggatggatggatggatggatatggagggatggatggagggatggatgattagatggagggatggatggatggatggatggatgattggatggatggatggatggatggatggatagatgattagatggatggatggatagatgattggatggatggatggatggatgggtgattagatggatggatggatggatggatagatggatggatggaccaattgatcgatggatggatggatgattaaatggatgaatggatggatgactggatggatggatggatggatggatggatgattagatggatgattagatggatggatggactgattgatcgatggatggatggatgattggatggatggatagatggatggatggatggatggatggatggatggatggatggattgatggatgaatgattagatggatggatggatggatggatagctggatggatggaccgattgatcgatggatggatgattaaatggatgaatggatggatgactggatggatggatggatggatggatggatggatggatgattggatggatgattagatggatggatggatggatggatggatggatagatggatagatcaatggatggatcgatggatgaatgattggatggatggatggatggatggatggatggatggatggacggatagacaggtggatgagcaaattaaatgagagagtaaatagatggatgaataaacaagcaggtgaaggagcaaataaataagcaaattgtgacccagaaaaggtaccagacagatggaaacagctacttaatttcaaatgtcaatggtcactgaagaaaagaaaaaaaagcaactggtacgtgggggaaaatgatatctctctatgcagaggttagaaatacaaccagatcgtgctgttccctctgttgtaaatggagagattttaagagggggctccttcctggtcccagcagaccagagaggctctcacagttgtatctaaagcaaactgtgagagtaacgtgatgtgaaatccaaaggaaatcacctcagggtattagtttgctcctactttgcaaagaccatcagttgagtttctgtggactttagtttccgcatctgttaaaatggggctgaaaacacttgcagaacctatcttaggtcgtgagggccacgtaagcaatgaatgggaaagccagaggtatataccacatggtgaagttggattatgagtggctggcctggtttgaatcctggagtctctaagcctcagttaccttatgatcggggtgatgattcccacttgatcaagttgttgagagaagtaaaaaggtaatgcttgattaggagatatacctaatgtaaatgacgagttaatgggtgcagcataccaacatggcacatgtatacatatgtaacaaacctgcatgttgtgcacatgtaccctagaacttaaagtataataaaatatatatgtatatatataaaggtaatgcttggaaaatgccaagcatggcaagtgccccactggtagttggtctaattgttgccaaggccgccatgcactttgccattttgacatctgtataaagtgtttataaatgtgggagttactattatttataaatcaattacctactccaaatccaagcaaaaacacgatatatacaaacaagaacttcagaacatcatgcaaaatgacctataaggaaataaacataattcaagtgtaaggtgcaagcacatattcacggcaccctgatcttcctgcttcccaccctctcccaccccccaccctaactgtctcttcacttgggccactctcccttcccccagccaaatcctcctgatgctccaaggctcaacactggatcctgcctcctccaggaagccttctgtttctgctccagccccaggttctcttctccctgtgattcaccctgtacctttcaccatagggtctcacactggaatcctcacacttgctgggggcagtggcatgctggagccagctcagaagagctcgcaagagctgatcgttaaattctcatgaagcttgtgagctggttgttaaacacagccattattcagaactaaatcaatgaataagatgaataagttctggggatctaatggacagcatgatgactatagtgaacaataccgtgttgtgtactagaaatttgctaagagaatagatcataaatgttctcaccacacacaaagaaatggcaactatgtgaggtgatgggtgtgttaattggaaattggaaatcatttcacaatatatacctatatcaaatcctcacattgtacatcttaaatttatacaattatatatgtcagctgtacctcaataaagctgggggtaaagaaattattatttgtattgccaaaaaattaaaccatataaacttacaattaaataaaataagttatatttaaaacaaagacaggccagggtgcagtgactcacgcctgtaatcccaacactttgagaggctgaggtgggtggatcgcctgaggtcaggagttggaggccagcttggccaacatggcgaaaccccgtctctactaaaaatacaaaaattagctgggtgtggtggcacacacctgtgatcccagctactccagaggctgaggcgggagaattgcttgaacccaggaggaaggggttgcagtgagcctagatcgcaccactgcactccagcctggggggcagagccagactctgtctcaaaaaattaattaattaattaatttaattaaataaaacaaagacaataaatgttcaaaactcatccccgtccagttatttcactatatttacaattgtgtgtgcttttgaggttacttgtctctatcatagccatatggcaggaattctagagcgatgtggatctgcatgtttctccctaactctatgtccagtaacataatgttggtagctggaaattggccctgagaggagaacagtagtccgcccttctcttcgatttcactttctgcagttttggttgcctgtggtcaactatgacccagaaatattacacacaatacaatattctgagagagacaacattcacatacttttattacagtatattgttatcattgttctgttagttattgccattaatctcactatgcctaattgataaaataaattttataaattccacatagccagttgagtcttagaataatttgttgattcccccccccaccccccagcactttgggaggccgaggcggacggatcacctgaggtcaagagttggagaccagcctggccaacatggcgaaaccccatctctactaaaaatacaaaaattagctgggcatggtgcatgcctgtagtcccagctactcaggaggctggggcgggagaattgcttgagcccgggaggcagaggttgcagtgagccgagattgcactattgcactccagcctgggcaacagagcgagactcagtcacaaacaaaaaaaaaaaaaaaaagcaaaaattattctaagactcaactggctaagtggaatttacaataaactgtattgtatagtatattttcattatttgcatagatgtatatgtataggaaaaaacatagcatattatataatgtttggtactatctgcagtttcaggcattcatggggggtcttagaacatctcccccaagaataaggggggactactgtatttacatcatgaaaattggtaaatgccacaaatcagagattgattgactcattgttttgttgatatctagatctaaatgatttaagacagtgatggagaaactattaatccagtttaaattttaaaatgtgttctgtctgcagcctttacattatgtatagcacaaaaatatcaacagaatattattctggtatttgcaaactagtatccaattcagcaaagaagttgctcacatcattgataaacaagtaaagttcaacataaatcttaattgtttcacttcaatcactgcttataaagaaaactctcaaccaacattcatgtctgatagcactcttttgtcaattgcaaccaaaagttgacaacaaaaactagaattcaataaaaagcaacaaataggcctggcgcggtggttcatgcctgtaatcccagcactttgggaggccgaggcaggtggatcacctgaggtcaggagttcaagacaatcctggccaacatgctgaaaccctgtctctactaaaaatacaaaaattagccaacatggtggtgcgtgcctgtgatcccagctactctggaggctgaggcaggagaactgcttgaacccaggaggcagaggttgcagggagccgagatcgcaccactttactctggcctgggcagcagagcaagacttggtctccaaaaaaaaaaaaaaaaagcaacaaattattctgagactcaactggctatgtggaatttacaataaactgcatggtatattttcattatttgcaaattgtgtgatacacatcgtttatatagtaaaatgtatgataagtcttttgtgtatatatatggaatatacatattccacctacacacacacacatacacacacacacacacagaacagtcgttaaatgtttaccagcacgccactgcccaggggtgagaacattcctccacaaactgtacccctccccagcaccccacaagcctgggggatttaaggtcttgacacttaaagcctggccgaaagcaaagggagtgcatggcatttgggagaaagagcagtgacctgccccttggtaaacccctcttcctctccagatctcagtttccccatctgaaaaatggccatcctccgagggccctcccgccggcgcagctctcaacgcaccttctggatcatgacgctgtacatgcccatggactggaaaccccgcgtatagtagagcatgttcgcccagcccagggccatggccagcacgaggcaggcgaggtactctttgtaggcaaacaagtacaagaagacagacagtatcacaagcacagcttggataaaactgttcaggagacacaggagacacgggccttacttacttctcagcatcagggcaaagatatgcaaatcccccaaacctcccttaaaccccctgaacagtcaccccggtgacggatgctgaagagaccagaatcacgctgcctcagatccatttggctaccatagaattcagcctgtagagacatcaccagatgccactcacagcctgtggtaagctgattgcagctggtggggactttaaaaaaagaaaaaacacacatccacagggccgcagaagattctagggtactgcccgggaggccatatattttttaaattacccacacgggcctggtgtagtggctttcgcctgtaatcccaacactttggggggctgagataggagaaacgcttcaggccaggagttcaggaccagcctgagtgacatagtgagaccttgtctctacaaaaaaaaaaaaaaaaagaaaagaaaaataatctaaatcacccacataatttctgactcctgcatcgatttgagaactactggagtagaccaaagatgtggtaaatgattgtatttttaaccaaaatgacaaaaactgccaatatctatacttaaaagccaatcatagcaaaagtcccccaaaccctactttttaaatcgtggtgttttttgggggggtcaggggggcagagacagggtcttgctctgtcacctaggctggagtacagtggcatgaactctgctcactgcaacctccgcctcccaggctcaagtgattctcctgcctcagcctccctagtagctgggattacaggcacccgccaccacaccaggctcatttttgtatttttagtagagatggggtttcaccatgttggccaggctggtctcgaacttctgacctcaggtgatccacccacctcggcctcccaaagtgctgggattacaggcgtgagccaacgcgcccagcattaaatctttttaaagtatgatgtatgctaagtgaaataagataggtgactccactatatgactgtacctaaaatagtccaattcacagagaaagatggaagaatggtggttacagggggccgggaaaggagaggaataggggctgttgtttaaggggtatggagtttgagttttacaggacgaaaacagttctaaagactgattgcccaacaacatgaatgtacttcacagtattgatttctacgcttaaaaaatgggtgcaatgctaacttttatgctatgtgtattttaccacaattaattttttttttttttttgagatgtagtctcactctgtcgcccaggctggagtacagtggcatgatctcggctcactgcagcctccgcctccctggttcaagcaattctcctgcctcagcctccagagtagctgggattacaggtgcatgccaccacacacaaggctaatttttgtattttttgtagagagaggggatttcaccagactggtctcaaactcctgacctcagatgataggcccaccttggcccaccaaagtgctgggattacaagcatgacccatcgtgcccggcccacagttaaaatgtttttaagtataatatatcgcaaacatacaaaatcaatatctactcctacacagtcacatgcagacatctgcataacatccattatgcagacatctggataaaaacactgtcttataacatcagacagtttccaaaattataaaatagctaaccaaagtcacaacacaggcacgattgtaagaaaaaccatctaattcatcaactgcattttagactgaaatgaagaatgtctccctccacactaacaaaacaaataagaagcagaagaggccggcgcaggagctcacacctggaatcccagcactctgcaaggctgaggtgggcagatcacttgaggtcaggagttcaagaccagcctgaccaacatggcgaaaccctgtctctactaaaaatacaaaaaggagccaggtgtgatggtgcacgtctgtaatcccagctactcaggaggctgaggcaggagaatcgcttgaacctgggaggtggaggttgcagtgagccgaggtcacgccactgcactccagcctgggcaacaagagtaaaactccacctcaactaaaaaaaaaaaacaacaacgtaaacaggactgctaagcctgttgccgccttctccactccatgctgccttccacgtggggctctgtgatgggtagagttggccatcaccaccatctcagcctcccagagtgctggaattacaggcgtgagccactgggccccacagccctgaagttttctgaccttctccatgggcatttacgtgtctcctactaggaggaagagaggagacccctggcgtgtaaccatggcagagtgactgggacaccgtggcacagtaggatatttgttcaagaggcggacacggcagccaccatacaggacgtcaaccctgcctgtgaggcgataaccaaggggccagacctacttacaagacaaagtggaaccaggcatccgagaggatggactgcagatccgagggtctcagcaggaagatggcaatgccctaaggccaggaaggaaagaaacagtgcaccctcttcatggccctcagcaggggagctgagcagagggtgcttccccaggaccaagactcagtgagggttgaatgcacaaaggcccagctagagtccaggtggcggatctgaaaggggacctgtgcctggggggcgtaggcacctccacggtgaaggtgaacgctccctcaaatcttctcacctccctcactccttaccccatcctcaccccagaacctgcaaagcggtactaccactacagccgccttccattccccacatccagcctagcgttccagcctccgagcctttgctcatgctgttccccatatccaccctgtaatgaccttgtcctcatcgtcctcgtgcccaatcctaccccaccagagtaagtgccatctctgccttcaagcatctctaccattccctgtccccagataaaagtcacctcccttcctctgaacactgatctgaacccagcttagggtctttttcggtctatcataaagtcttgatatttatgcctatgctatgtccccaaccaggctgtgaattcaaagagggcaaactcgtcccaaccctgtcacctcctccagggccacacatatatagaaggtgctcagattatatgtgttgattcattggatggatggaaggatggatggatggatggatggatggacggatggacagatggagagatggaaagatggttggataaaggatagaaggatggtcggtaaggatgagtggacatgtgaatggatgaatgagtggctgggtccatgaaagagggcaggtgatcggatgggtggatgggggtggaagaggacaagggacactgagtggctgggaaggtagataaatggcggatagttgggcagatggatagagaagtagatggatgaagtaggtaggataggccagccttatccattttttcccatgttataactcagaaaggtaaggcttgggaaggaaacgcctccccagaaccccccagcagtaatggcagagcagagagggatggaggctgtcacctgcctgcctcgcggggcggtctggaagggccgggtggcccacttacctctttcacagagatgcacatggcccagatgagcacaaacatcctccctaggagctgcagccaccccatcttgtgcgtcagggccaaggggtgcgggatggcctgcagggaaagaagaggggtggtcagtataggaagcaaggaggacagggctggcaccaactctagagggaccaaaacccaggtgaaacactcaagccgggccagagaccagcatgaaacctgatctctgtacagggcaagagaaggaagagcagctccctgaccccaactctcctcacccttgatggaaacccagaactctacaacgaagaatatcatccaatccgtgctaacaaccctcacactccattgcaatagcctttccggaacccatccatatccaggcactcaacatggcctcacagcaccgttaaataaagccgaggctctgtgccccacgtgacgcatgggaaaccgaagcccagcaggcagggagagcttatcctcctcccgtttcctgcagccctcacagcagaaacacccagctagttctatatttacagacagagaccctgtgcagggcctgagtctccgaattctccaactttcctcccagcaagggtctgcccttgggactcggcacctggggcttagcccaggctaagcactgaagacatattcagttccctgggaagcgtgaaggacaactgggggaccccgcccaatctcctggtctctctgggcctcagttttcccacctgcacgtggggcagctccaagcccctccagctctgacggccccattttccccctccaaggggcccacgtacctcctcctcccgggggcggtagtacgagacgagggtcagggtgatgttgtagaagaaataaaagcagaaggacagaaagaacatgtgcttggcaaacttcttccacttcatatgcagcagcgtgtgcagcggctccagggtcagcatctcatgccggttctaggggtagaatgccaccagtcaccatggagatgagggagagagggagggaccgttttctaaaggcctgcgggagctctgagtcagtgctgcagaaggggcccatcattatgcccgatggactggtctggttggaaatgctgggagggtgatttccggctcctgaggctcctccccagggtactagggcagcagtcagaggccgcaggagcccgggcttgcagcaggaggacccgatgcacagcagaaagtggaggatagaagcgggcaggaggtggtggcaggggttccagccccagtttgctcctcctttgctgtgtgactttaggacagaccctgaccctctctgggcctcagactcctcacctataaaactgctaacaatccctgccctaccaaccaggctgctgtgagggtctgggaagacccaaggcaaggggactctgggaagcatgactcttagtaaagtatgaaggaggaagacccagcctgctgcctcactgcccccaagagctgaacacctctcatagctgctcctctcttcacctccagttgcaccgaactctcccctctagcctcctccaggaaggccccccgattgctcctcagtgcactctctgaccctcatttgggaccaggttttggggaagaaagaattctaagcctggccgtatacaccaacggggggtgggagagaaacaatatggaaaggatcaaccccaatcaccccatcacccacacccacacccaaacagccctggatactcggtccagaagacctcccgcccaccgcccccgccaccaccactcaggtctacagtccaaggtcaatcaggaagagtcgggcccagcatctgtcccaggcctcgccttttctgtgcctgactctgctcactgaggcaacagagtggggtatgcagatgccgagggatggagctggcagcactgggtcttcccagcgtcctctcagcccctggcctgaggtccagccctcttctccctgcccttccccgcctgtgcaggagacccacgtcgatgttggtgttgtagacagtgatttccagcactgagttgtccgtggtggtgtccacgttggtgaggtcgtagagggaggatgacacgggtccgtacgcccagtcggtgaacttcctggacaggctccggagccgcttctccttgatctcacgactgaggatgtacttcaggatctgggacaggaggaggaacaaccatcagctgcagaacaggggcttaaggccaacagggctggaccagccagaggctggctgggcccaggggatacacccgcccagaatgggtggagacctgcctctgcgcctggcgccatggcccctgggccccgtctttatctgtggaatgcgcacaaagcttgctgttccgcccatctcactgggggttgtgaataccagggacaaagggtgtgaaggttcttcgcaggctgcagcaagctgcacaatcagcttgaaatgcctcacgccagctggggacccggttcggtgaaaaatccaggcactgatgattttttagaaacagtttccatttgctctggacttgagaagaagccagaagtgttctcagcgtccccagcccaccctaagccaagactcctccagctgtggctcaccactctggccaggcaggtggtgacgagagacaccacgccctacagggaggcccgtgggacttcggtaggccagtgatcctcaaactctgctgcatgttagggctgctgggaaacttagaaattcccacagcatggccaggtgcagtagctcacgcctgtaatcccagcactttgggaggccgaggcgggtggatcatttgaggtcaggagttcgagaccagcctggccaacatggtggaatcctgtctctactaaaaatacaaaaattagctgggtgtggtggcaggcgcctgtaaccccagctactcaggaggctgaggcaggagagtcgcttgaacctgggaggtggaggttgccgtgagccatgattgcgccactgcactccagcctgggcaatgaagtgagactctagtctcaaaaaaaacaaaacaaaacaaacaaacaaaaaaaccaaaaattcccacagcatcaactgatgaaatcgaaatatccagggtgggacccaggagtctgtatttgtgaagcttcctggttggctccaaagtgcaggctggacacagagctgctgtctctggcttcctacttccaaaaagctgagccctgggttaccccaggatgagacatggacttcctaggacaccaactcaagacccaagaggaagggactgttgggaaggacagtgtcagagacctggcctcacaagacccactgggttcccatcccatctgtcatgagagcccaggcagagagcttctagggataaggccaggtctctccgccccgcaccccagcctataaaagccccaggacggtggccaagctgggcagcatccagaaaagttttctggaggacacggaacagaggagggaagcgggagacaggtgcctcccccgggccggccacagcgggcacactgtcccctagaaaacaagggggtcctgggaccatgctccatgcaggaagcctcctccctgggctggggtggcagggacagcacccgccacagtggcacacagggaagacggccttggagaaggctccttctgcaaccacaagctgactcttcaaagccccagcaagctgtgaccctgagggtaggcaggagctgcggggaggcagacacacaattcctcctctgttgaagccgttctccatctcctcctcccccacgggagaatcaaaaggccccttgtgggtcccagccctgaccacttgggacaggaccaaggccctcggggcagctgaccagggaggcgggtaccctgaggctggcacagctgcgattactcaacagtcaccaccccccagtgtcctctgatggcgtcccaggagccacagcctcctcgcagagcgtagagacagtgaggctgaggaacacgcttggaccccagaatcagtcccctgagaagaacatctcagaccaagccatgacaccggcccctgaaagagatctgagcccagccctgctcaagtcttcaccaaggctcccagccaagcctcgatttctcagccacatcacacaaggcaagaagggcccaaagcggccacactcttggctggggacctggcacagagttccaaccgcacaaacaggctggggtctccccataattgggaaatggcagcatattagcgctgcgcccgcagcagccattctggaactcccgtcctcgtgagaggcagaaggccccaagggccacccactgctggggctattgtgtcacctcagcctcaggctcccccagcctagccctcccaggacaagagatggaaacgcggcgtattagggactgaagtctagagagtgggctgcatcgcaccagctccgcgtggcccctcagaacaaacctgcctccggccgccacgccactgcagttctggacccaaggctgggaccttctcaaggctgaggctgtggtttgtgaatccccagtaaggcccccggggctgagagggtggcagctgtacctcctgacctcccgacctcctgcctccccacgccccatggccccacctccgccttgcccatcttggcggccagctgcagcggcgtgaggccatcgttgttgcgagtggtctccagctcccagttgccactccgcagtaggatcatgtcgtacatgcgcttcacaaagtcattctgcgtcttgaagtcctcggccacggtcaccagggcgtgaaggatgttgttgcctcgtgagtcccgcgaggtgatgtccgtctgctcgtgctccatcagcagctgcacaatctcgggctggttggtgcatgctgccagggccaggggcgtctcacctgggggatgagcgcactgaagcttggttctctcatgggccggaagcagcgtcccccaagccccaggactggggcccatatcctatctcagcaggatgggcacctcaggttccctagccctctccccatcttccgcttctacggggaagagtgaagctagatcactgcggtagcctcctaactggcctccctgcctccaccctggccctttaatactctgctcagcacagcagccagaccaacctgttagtgcctcccccagaatgaaagcacaggttccaatgacagcccacaaagccctgcatactctgacctcctctctccatcactcactccctcctgctacaacggcctttttccacctcctccaacacgccgcctgggggccttcgctcggctgtcccctctgcctgtagatagcccagtcactttctccctcacctccttcaagtccttgctcaaatgtcacctttcagtgagccaccctaaccactctatttaaaattaaaatccaccctcctcttgtcccagacagaactcttggttccttgtcctctgctttacttttttttttttttttgagatggagtcctactctgtcgccaggctggagtgcagtggtgcgatctcgcctcactgcaacctctgcctcccgggttcaagctattctcctgcctcagcctcctgagtagctgggactacaggcgcccgccaccacgcccggctaatttttgtatttttagtagtgatggggtttccccatgttggccaggatggtcttgaactcctgacctcgtgatccacctgccttggcctcccaaagtgctgggattacagatgtgagtcactgcactcggtctactttgtattttttaagagcacttatcatttcatatcatagtatataaaattcttatttatagtgcttattaccgatggtctctccctgtctagaatgtaagttccatgagggcaaggatctctattttgttcactgatacatttcaagtacctagaacagtgcctgatgtagacagtaagtgctcaataaatgcttgttaagaaaaaataaggcaagtgactcacatgaggtcacacagcaagcctgggacacgaccagctccggacaccaggtcttcagctgcctcccctctcctcgccccacccaacaaatgcttcccaacaccaggtccaaccagctcctatgcagggcaatggggacacacgatgaactggacaagaccccgttttccaggacacccacacctggacacgcagggctgcccagagcacagactagctagtcctgctgattaaaaaaccacccagaagatagtcccagctactcaggaggctgcagcatgagaatcgcttgaacccaggaggcagaggctgcagtgagccagatggcaccactgcactccagcagcctgggcaacagagtgagactccattaaaaaaataaaaataaaaaaaataacacccagaagagaaaacagatgggtgatcatcagtcaggcaagactgggtggcaggaggggtctcctctgcaacaaagttacacagagaaatttttgtgtgtgacggagccatttgttccctgttctgactgcagtggtggtgaaccaactcgacgcactgtgaaaatgaacagaactgtcctctaacacgggtgactttcactatatctaaattatgcatttcaattttttttttttttcctagagcatcctaaccccaattgcttctggactctgtgacttgtgaggcaggggagttctgccctctcactctcgactccctgtctgcagtcctgagatgcactgggccctggcacagaggtcagagctggaggccaggacacctaagtcaatgccctgctaccctggggcaagtcctttcccttcacagagccatctcctcgcctgtaaaatggggctgcctcctcagcctccctcccaggtctctgttccctcagagagctacccaggacaatgcttctaagaccaccaggtgacaccaccggaacatggactcctcccccaacacctcctcccagcccctccttctctggtccaccctggtgtcctgctcagatggacatgcccagcctcctcccctcctgcccctctggggcaccagagcttcttaaggcagggacagtgtgggtggagctcaaagcggggtggcccctcccttcctccctccttccttcctttctctccctccgccctccttcctcctcccttcctccctctccctcctccttctcccttctgtctcctgcctccctcctccctccctccccctccttactcctcctccctctccctcctccctcctcccttcctccctccttcctgcttccctcttcctttctccctcctcccttccttcctctccctcctcccttccttcctccctcatccttcctgcttccttcctccctcctccctctccctcctctctccttcctgtttccccctcccttcctccctctccctcctcacttccttcctccttccctctttcttcccccctcctcccttcttccctccttccccttccctcccttcctctcccgtctccctcctccctcctcccagactccgcaccgggcgggggcggcacccaccgaagtagaagccttcgtgttggtacttggggttgaagaaggcccccttggcgtgcgcgttgacgtcggcgccggcggcgatgagcagggctgcgatgtccccctgccgccgctcgatggcgatgttcagcgccgtctgccctgcggagcgggcggggacgcgcgggagcctcagcgccgggcacaggggcctcttgcccacccgctctggcctccataccctccccgaacccacggggagatcagaaccctggtctgtgtcgccagctaccaggaatcccagctttgttctttgcttccttcatgcctgcgcggacccaagaaatgtttgtggagcgcctgctccgggctccggccccaggcgctgggggtcagtgggtgcccaagacgcaatctcgattattttcctcaagaagcccgcagtgtcactgagaacgaggtgctacgattcagaggggtgcaggagctgcggtacccagagcaagggcccttcacagccagagagcgtcagggggcttcccagagctctctaacctgggacctcagaagtttagcgaggcggtgtggggccagctcatcagccagggcaagagggcagagcttgtgctaagggccagagtcacagacggccttgaattaggaaactggcaggacgagaatgtagggctcggtgcatgggtgttttcagacctctctggctgcaaaagtggaggatgcgttagaagcagccgagaccagtgaaggaaatgatgaggcctgtaatcccagcacactgggaggccaaagcaggtggatcacctgaggtcaggagttcgagagcagcctgaccaacatggtgaaacatggtctgtactaaaaatacaaaattagccggccgtgggggcgcatgcctgtaatcccagctacttgggaggctgaggcaggagaatcgcttgaacccaggaggcagaggttgcagtgagccgagattggtccattgcactccagcctgggcaagaagagtgaaactccatctcaaaaaacaaacaaacaaacaaaaaaatgatgaggcctggactaaggggagttggagggcacatgaagggtggagaaaggaggaagcccaaagaccctctggagaaagagccttcaggatgcccggctgggaagaagggtgtctcaggtaagatctaggtattcagccctggcggtgggtgaatgatacgctggtgacacagcaagaggaaagaagggtagcgggagagacactaagcctgctggagaccagagaacttccagatggaagggaccagaaggctggagtgggggaagggtctcgaaatgcaccaacagaaacagcagtttccaaagagctgccgctgtgtcataaacaaacatagtcttggtggattaaagaaccaagctttaagacacattagaaagtttgtttatagctaaccttttggtagggaagaccttcttaagcaggatccaaaaggcagaaaccataaagaaaaggctgacatatttgcttacataaaggtttttggttttgggggtttttggttttttgtttgtttgtttgtatgtttgacataggatcttgctgtgtcacccaggctggagtgcagtggcgtgagcatagctcactgcaaccttgaactcctgggctcaaacgatcctcctgtctcagccccccaaaagctagactttcatatttggcataagaaatgctctaagacatacagttaatcaaacaaagcaacttgtagaatacagacgtgatggtcctattttatgttagataagtaaataaaactatttctgtgtacatatatacacacacacgtgtggactacaggcctgcaccaccactcccggcttatttttaaaattttttgtagagacaggatcttgctgtgttgcccaggctggtcttgaattcctgggctcaagcaatccccctacctcggagatttctgtatttccgaatgcatcctaatgaaagttaaagacaagtgataggctggggaaaatatttgagatatataaaaaggcaatgtgttttagggccgggcgcggtagctcacacctgtaatcccagcactttgggaagccgaggcgggtggatcacttgaggtcaggagttcgagaccagcctggcccacatggagaaaccccatctctactgaaaatacaaaaaaattagccaagtgtggtggcgggcacctgtagtcccagctactcaggaggttgaagcaggagaatcacttgaactcaggaggcagagatcgcgccactgtactccagcctgggctagagagcaagactctgtctttttaaaaaaaaaaaaaaaaaaaaggcatgccaggcacggtggctcacacctgtaatcccagcactttgggaggctgaggcgggcagatcacgaggtcaggagatcgagaccatcctggctaacctggtgaaactctgtctctactaaaaatacaaaaaattaggcgggcgtgatggtgagtgcctgtagtcccagctactcgggaggctgaggcaggagaatggtgtgaacccgggaggtggagcttgcagtgagcatgccactgcactccagcctgggcaatagagcaagaccccgtctcaaaaaaaaaatagaaaggcattgtgtttttaaaagtctataatatattacaagcgcctatgaatcaatagaaagacaaacagtctaaaagaaaactgagaaaagattataaacaagcacctcacagaggagaaaatacacacagtgaataaacaaagtgaaagatgtttggaatcactggtggtcaggaaaatgaaaattagaacctaaagagttaacccttttcacccaccagactggaaaagaacaaaaaaaaaaaaaaaaggataatttgcagtgttagtgataagtaggagaatgagtatttctgtacaccgttgtggggagagagtaaatgagtatcttttagagacaaatttggcaataactattataactttattttatttatttaaaaaaaaatttttttttttgagatggagtctccctctgttgcccaggctggagtgcagtggcgcgatctcggctcactgcaacctccgcctcccaggttcaagtgatcctcctgccccagcctcccaagtagctgggattacaagcgtgccccaccacgccctactagtttttgtatttttagtagagatgggttttcaccatgttggctaggctggtctggaactcctgacctcaagtgatccacctgccttggcctcccaaagtgctgggattacaggcatgagccactgcgcctggccactattataactttaaatatgcatgcggttgaacccagatattccaattcaaaatattttctgaaacatatgtgcacctgtgcacagggtcatagacaagatcgtgcactgtgacattgtcacaacacagctggaaacacctgactgtctgtcagtgggggagtggtgaaattagccaaggtgcagccgcaattgcagacgaatctggtgaaaagaagctagactttcatattttggcataagaagtgctccaagacatatggttaatagttaatcaaaaaaaccaacttgtagaatacagacagtatgataatattttatgttaaataaataaaactttttctgtgtgcacatatacacacacaaatgtcaaaggcctagaaaactccacaaagtatatgggtaaaggacttaaaaaaaaaaaaagtatgtaaaatgctgggctgctttacaatgaaactctattcatgtgacgtggatgttgttaggctgggtgcggtggctcacgcctataatcccatcattgagaggcagaggcgggaggattgcttgagccccggagttacagaccagcctgggcaacatggtgaaaccctatccctgcaacaaatagaaaaattagctgggcggggtggcacgcatctatagtcccagctactcgggaggctgaggtgggaaaattacctgagcccagggaggtcaaggctgcagcgagtcgtggtcgcgccactgcactccagcctgcccaacagagtgagaacctgtctcaaaaacaataataaaataaaataaagtaaaataataaaaagaaactgttatattgaatctgatgatggatgtgtagaggtttattattctaatatcttaacttcatgtttaaaatttttataataaaaatgtcttaattgaagaattgcttaaaaaagtaaaactctgaaggcctctgataaaatgctttaaaatgatatgaataaagttgtgattggttcctcttagcagcatagggaggaaatattcgcccttgcccagtggggaaactgaggctcagagaggtgaggcagttgcctgtagtcccagctacttgggatgctgaggcaggagaatcacctgaacccgggaggcagaggttgtgccactgcactccagcctggtgacacagcggaactccatctcaaaaaataaataaataaataaataaataaataaataaacaaagtcattgctctaaataaggttattttagatacaaaaaaatgctatgaaaataaatgaagatagggtgacagaaagtgactggggaagggaaactttagagtggacaatcagagtggtcaccttgggtcctgcccagagtgtggaagaatgctactctgctggtcctggagcccctctgctccgggtggaggaaatgctaagaggaaggaaggcaccagcggatgggtcagaacggtggtggggttggtttccaggaagacaagaataaatagctcctcccaccattcagagaaagaggaggtgcccacagcctcccagacctcctcgccccagcaagaggcagattcatgaaaggagagggaaaggggaggctaagaacagggagaggtaaggatctgtgaccgggacagcaaagtcttcacagaaacactaacaaccttctttcattcactcatccaaaaaatatgtactaagcgtctcttaggtgagaccctaagggtactgggaaatgaactgtaagcaacagacttcatccctgccctcaagggaaacatgttgctagcaaagggtagttcgtaagtcctacaatactgacaagaagaaaggaggatacaaaggggactgaaaagggaaaattaggacaagcaagcttgaggcactggcctgaacctccctgtctgcaggactactgtcaactccttagagacaggctgagaatgtgatatggttcatccagtttctctctttgcattggctaccagggagctcagtgagcagtttagcactcagttgcaacagtcttccctaggtttcctctcctccactccatatcttctagtttgtcacaatccttgacttcttcttatatataacaaaaatgcttttgaaagtctgcagagttcaaataataaatcacaattactttctcccatgagaagggttaaaggccaaagctaaactcccacctggaaaaacctaaattgtggcagggcgtggtggctcacgcctggaatcccagcactttgggaggtgaaggcaggtggatcacctgaggttgggagtttgagaccagcctggccaaaatggtgaaaccccgtctctactaaaaatccaaaaaaattagccaggcatggtggcaggtgcctgtaatcccagttacttgggaggctgaggcaggagaatcgcttgaacctgggaggcagaggttgcagtgagccaagatcgcgccactgcactccagcctaggcaacagagcgagactccatgtcaaaaaacaaaaacaaaaaagctcaaacatctagtgcccccagcatatcagcaagacggcatccaattataattgagtcaatcgcttttgccacgagcacctcataagaccgtaaagcgctgttgactgactccaaaactcaaataaagacacatcttactgattttcccctgtggatttcctgggagggagccactctcccaaatttgctctcccagcatcctctctggcccacttacaaagaaatccacaaaactgagacccaaatggggacagttaatgatgatgatgatgatgacaacagtcgacttttggtggcccctgcccggctctcttgcctcacttccagccttcttttcattgctcaaccatgccaagctcaatcccatcttggggctttcgccctgatccttctcatcatgtcggcctcaggccaaagatgaccactctgactgtccactctaaagttgccctcccccagtcactttctgtcacactatcttcatttattttcgtaatattttaaatctaaaattatcttatttagagcagtgactttctttcttttctttgtttctttttctttctgtctttacttatttatttattttgagatggagtcccgctctgtcactaggctggagtgcaatggcgatctcggctcactgcaacctccgcctcctgggttcaggtgattctcctgcctcagcctcccaagtagctgggattacaggcacctgccaccatgcccggctgatttttgtatttttagtagagacggggtttcaccatgttggtcaggctggtcttgaactccggacctcaggtgatccacccgcctcagcctcccaaagtgctgggattccaggcgtgagccaccacgcccggccttagagcagtggctttaacctgtcttgttcaccagtgcatgcccatgccaaaaacaatgcctggcatggaaccagtgctcaaaattatttgcagaatgaaggaagaaagagagggttgcctgaagcatccctggtaccatgctacatgcttggggctcctcaatggcagcagtgcctccacgtggcctggccagcagtggccctgtggccccataccccaccctcagagactcctgtctgcacagcccctctgcaggcaggataccttcataggcctcctctgtgtactcggcgttgatgaacctgcccaggatgtcgttctcttcagcaaaggcaagcaggatccgcactatctccttggtgttggggttgatgtttaacaaggccttcatcaggcaggtcttccccgtgtcggaggccgtcagcttgtgcatgaggaagtctgcaggcagggccatgggtggagttacaggagggccccggctgcccttggccctcccagcccagagggtgtggttgctgcagccgcagaccccaagcccctgctccacatctccactcccagaccttacacttggccgctctcctccctctccagctgtttctcctccgtctcctatgctggctccttgctctctgtggcccatgggtgacgtatctgaggccttttgctctttgcccactgtatggcttcccgctgtccacccccctgctgccaccctggaatctgtctccagcctgccccctcctcgtggcctgcaaataaagctcatggcctccccatcaacctgatactgcactggtccccgagacacccagggctccaccagccaccaagctacccaagtctaaatggcaccatgctggaccccccgtccctcactccccaggtcctcaaatcctgccaatgctactggccgaggagctgctcagaaccgttcccttctcaagccctgcttcagggtcccagccctgcctgaacagtggccttctccagcttcacccccatcttccacacagtagtcagacccgactctcacctgcccaaacccttctgtggttccccattctcctcggagtcaagttcaaagtccctagccagaattcaaggcccctcacactccagcctcatgggttggtgaggggaggggaaaatgggcaccagaagccaagcagggcccccagccctgcaccctctgccaggctcagacactcaccaggcacatcctcatcatggcgccgcctgcaaagctcctgcagctccaccagcaactctaccaactcctccacgcagccctcagacacggctgcaaagatgcgcttcttcagccgcctctttttcctcctctgctcttccttggccagctgtgcactgaagccagaaaatgtttccaactcaacacacacatcctctcaagctcaatctctccttttccccgccagagctgcctacggggcgctgcagctgccgccaacatctcccatgcctgtcacaatgcctgcaaactcctgggctctgtgtggacccatcaggctccccttgtaatccatatgcaatcacattttgtcaaaatacctacatttggatgcatgaagtaatgatcaggaaggatctatgcctattaaagacattaccttgaaaatataagatttcatattttatgttgtttgaacttttaaaatctatccttccctgtcctcccactccagataagcaaccatggtaacgcgttgatgtctccttttgtttcttttttcttttttttatttgagacagagtcttgctctgtcacccaggctggagtacagtgacacaatctcagctcactacaacctccacctccagggtgcaagcaattctcctgcctcagcctcctcagtagctgggattacaggcatgcgccaccacgcccggctaagttttgtatttttagtagagacggggtttcaccatgttggtcaggcttgtcttgaactcctgacctcgtgatcctcctgccgcagcctcccaaagtgctgggatgacaggtatgagccctgcacctggctatgtatttttagttcacataaatggtgtcgtgctacagttctttttccactgcatcctgctgtttgaatgtttcataacaaatgggttttatagaattcaatactccactccttccccgtaaacgtcctacatgccatggacccatgactccacttgtcccaatccccaggaatggtggattctttctccttcctgcagggccccggatcctgtctctctggcacccccagcctgggtgggcacagtgggtggagggggaggggcagacttacctggggctgttgggattggatggggtctctgtcacatcatcctgaggagactggggggagtccatgtcatcacagttaccagagatgctggaggtgttggcagggggaacagagagggttttaaagttttaaaatgggccgggtgaggtggctcatgcatgtaatcccagcactttgggaggccgaggcaggtggatcacttgaggtcaggagttcgagaccagcctggccaacatggtgaaactaaactgtctctactaaattgtctctactaaaaatacaacaactagccaggcgtggtggcatgtgcctgtaatcccagctacttgggaggctgaggcaggagaatcgcttaaacctgggaggtggaggctgcagtgagctgagattgggccactgcactccagcctgggcaacagagcgacattccatctcaaaaagataaataataataataaagttttataatagacagtggtagcatgccacagccaggcctggccccgtgacccagggcaagtcactggccacatgctggagctgagggctgggcccagggcaaggggttgggctggggcccgtactcaccactgccggatgttggaatccatgggcttggagaagacaggaggagaggtcttggcaactgtggggttgggttcaaacccttctatctccaggaagaagtgtgcactgagggaacacggaggaagcctgttagggccgagccaggcagagcctgtctgcctgtgtcctgcctcctggccccagagggtgcccccatgctgagcacacaccctggccagctctgagcccaaatggccttgcccagccctcccgggagccctcggagatggacactgtcattatcacctacgtttcacagatggtctccagggagctgcgagtcaagtgtgaaactaaagaaaaggactgaggcgaacccaattgatgtagaggtttattttgccaaggttgaggacacacccgggaagaagacacacaagccccagtaggatctgtggcccacacttcctcctctgaacaagattctgagggcctcaatatttaaaggtgaaaagtgggcaggagagaaaggaggaaagaaaaaaaaaagagggagcaggccgggtgcaggggctattatcccagcaccctgggaggctgaggcgggcagatcacctgaggtaaggagtttgagaccagcctggccaacatggcgaaactctgtttctacttaaaatgcaaaaaaaaaaaaaaaagtagctgggcatgatggcaggcacctgtaaccccagctactcgggaggctgagacaggagaattgcttgaacctgggaggtggaggctgcagtgagccgagaccgcgccactgcactccaggctgcgtgacagagcaggactccgtctcaaaaaaaaaaaaaaaaaagaaagaaaacagggagcacagggccacgttcttgtgaggcttcgattctgcttactgagcacgtgttgcacgtgaaaaggggtgggtagtggaaacagtcaattatggattcatcttgcgctcagtaaatctgcactttatggaagacaaacatagacgcatggtggctcacacctgtaatcccagcactttggaaggcctaggcgggcggatcatctgaggtcgggagttcgagaccagcctgaccaatatggagaaaccccgtctctacaaaaaatacaaaaattagacaggcgtcgtggtgcatgcctgtagtcccagctacttgggaggctgaggcaggaaaagtgcttgaacccgggaggtggaggttgcagtgagccgagatcatgccactgcactccagtctgggcgacagagcgagactctatctcaaaaaacaaacaaaccaacaaaaacatagacgcataggggaagcagtcagatatgcatttgtctcagtggggtcgggtgagggaggacaatttctagtctcctcttgtcctgtagtgtcaattagctgctaatttacaatgtcaaggtgaggaaggccccccttggagacatgtggcttctatctgtagataaagcaacttgcccaaggtcacgcagcagataggtagcaaagtccagattcaaagctgggctaggccaggtgtggtggctcatgcctgtaatcccagccctctgggaggtcaaagtgggcagatcagttgaggtcaggagtttgaggccaatgcggcaaaaccctgtgtctactaaacatacaaaattagctgggtgtggtggtatgcgcctgtaatcccagctattcaggaggctgaggcagaagaattgcttgaaaccgggaggcagaggttgcggtgagtcaagatcgtgctactgcactccagcctgagtaacagagcgggactccttctcaaaaaaaaaaaactgggtctgggtgactctccttgctagaaatactggatggctgaacccgggtctctactgcgggtggcctaacacttgagccaggttgccctgtctgcagccacctccaggtacaaaggacacctcaaggatggggaagatggtactgggagctaggttttcccgtcaccacctacccaccctcaggcctcaggtctgaagtcagacgccttctgaggggccgtccctagactctgagatccacgcgggccttcctggctcttgagggagagggagatggctggagttatacttgcccccgctgatcagcacttgtgctgtttgtcacagcagaaaatgggctgaaaatggctgatctaggctgggtgcagtggcccaagtctgtaatcccagcactttgagagctagaggcaggagggtcacttgaggtcgggagtttgagaccagcctcgccaacatggtgaaaccccatgtctactaaaaatacaaaaagtagccaggcgtggtggcacgcacctgtaatcccatctacgtgggaggctgaggcaggagaatcacttggacctgggaggtggaggttgcagtgagccaagatcgcaccattgcactccaggctgggtgacagagggagactcctctagaaaaaaaatggctgatctagagcagggaggacttgaggggtcagaggacagggctgggaattccctgtggagaaggaagccatctcaggcggtggaggggggcagcggaggggaggggcagggcaagggcagctttctccttgggctgggagaagagagacagaagcccccggccctgtggcctggctgagccccagcgaaggagagacgctggcctataagaagcaagacatacacccgtgatgtgactcccagccagacacaccgccagctccaccttcagacacacccacaaacacaggcacccatgttcttggaaaccacaatcacacgcacagagaagagccttctggctgacgacaacccggactgtgaggatcaggctgagggtgacctcggtggcagcaactctcctgccctgcagctgctacaggacaactgcagcctctgtggcctggccagggactgtggcctcctgaccagcagggcctctccaggcacacggggctcctaaagcacctttgctgcctccttcattctaaggcccagaagggaccaacatgccccttccttcctcacaagactacagaagagctcccaaagggcagtctcagctgtgtcacattcaggagggagggtagcaggaaagggactgtggccccattctgcagacaagagaactgaggctcagtatggagaagcagctcatccatggtcaccccccagggtaaaagtcaaggtggtcaaagaacctgcttcccgacatccaggctcatagtccacactgcaatccatgcttctttgctctcgccttagcaatctgagccttcttccagctaaactagctccaggggttggccacaaagggaggttgcttggcatggccacttcctggggtggggcaagcaggagagagaccccgggctttcccaaggaatctctgccctttcctccagcacagacaaacctagaaggctcagcgctaatccagaaatggggatacatggggtggagggcagtactggctgccagtctcacctgcctcacctgacagtctcctgcccaccaaaaggaaccttctgatctgagctcccaatcaaacccttcttccaaaagggaagacaaagggaggatttaaacccttgcctgggaacctaaagcctgggttctagtccagctgtgtctctgcctcctgtatgaccccagatgatcacttgccatctctgggccagtcatcttcacctgaatggatgatggttgggccagatgatccctaaggtctggaccctggagccagggtagctctgggatcgtcctcttatggaattccagctgaagtgggcatcggaggtcaaccagtctgattgccacttccctgcggccctgcagtgccccagaacttttgccctaaagtagtcgctccgcaacaacagcctgacctagaagctccaaacacatttgctagtggttcagccccaaaacatcctggttgagatttgccaaattatctccagacagagctccaagccctatacccacagctttttccccaagaatgttggtccagtctgtcccctgctccccatcccgccctacctgtctgcattcctcagtgttgcatttactcaacaaatatttattgagcatctacaatgtgccaggcactgtttctgcagctgaggatacagtagtgaacaagtggacaaaatttccatcccttccagagctgctgttccagtgagttggtcagaactgaccaagaaatagtacaatgaggccacgactttccacactctggacaatacaccatcctacagctatacattcctcaatggcagagactacagttgaattatccttgattcccaacactggtcctaacactcagaagacttcatcagtgaatgagtgggaggatagataatgagtgaaagatgaatgagtggaaggaaggatggttggttgtatagatgcccagataaatggatgaatgaataatggagagatgatagaatgagggatgggtggatgatggatggatggatggacagatgatggaatgggtagatgagtggatggatgatggatggatggatggatggatggatggaggatggatggatggataggtggatggatggatggatagatgatgcgtagatgagtgaatggatgatggatggattgatgaataaatgattgatggatggatgaatagatgattgatgggtgaataaatgacagatatatgtatgtatggatggatggatggaggatgggatgggtagatgagtggatggttgatggatggatggacagatgatgtatggatggatggatggatgataggtagatgagtggatagatgatggatggatggatggatgaataaatgatggatggatggatgaatagatgacggatgggtgaataaatgatggatggatggatggatggataataagtaattgggagggtaggataggtggacaggaccaataagcagataaaccaacataaccttaaaccaaaatgttgggaggttgcatccttcaggtgacttccactgtgctctcaggtgcttaaagcctttacctctcctaagcctcatccccttcccaatctctcataagaagatgaggagcagccctttgtctctgccctacctccctacctactcaaggccttctcccagagtccacaggggcccaaagatggtccagaaagccatatcacaagagtgtgtatccacttcagacctgaggctgagagcccgagggaaaggaagaagcatttcctcatcactccatagtgtcctcgtgctgccaagggctgtgctgggctacccggctgcttgctcaccagctcacccactccttctctcattttcctgcctgctcttttttttttttttttttttttgagatggagtctcgctctgtcgcctaggctggagtgcagtggcgtgatctcagctcactgcaagctctgcctcccgggttcatgccattctcctgcctcagcctccccagtagctgggactacaggcgcccgccaccacacctggctaattttttgtatttttagtagagacagggtttcaccgtgttagccaggatggtcttgatctcctgacctcatgatccaccctcctcggcctcccaaagtgctgggattacaggcatgagccaccgcacccggcctcctgcctgctcttttattgactcatctgcttactcaaaagctactaatatcctctgtgtaagaaactcagggagaccgaaggaaagagatgaaccttccagggactccatgctcagtgatctcgaccagagctaagacatcatcccaatgaccatgtcaacctcttcagagaggggctgcgctatgggagctcagaggaagagaagatccttccagttgaagacagggatcagggagggctctgtgctctgttggggtgggatttggtctgggtcttgacaccagtctggtttgggaaaagccccgaaggcagaacagcatgagaaagcctcaggagaaggggaggtctatgtctggagaaggaagctcttggcatctggagcaccagatgtgagaagacagtgataagcgcagggctggggaggaccccaactgttgggcaaagacctaactcctggggcagagcagctgctagaccgtgaaggtctgtcctgcgcccgccctactggtcactgcacacactacatcccacccagcgtcataagcacatggcaaggccttggcccagtgacaccctggctccaggcctgctgtaggtgctgtttgtttcttccttccttctgtccagaccaaagggcaccagctgggtgtggttgacccaggtgagcagatagctctataccatttctactgcatttctgttccttaaagtcgaagaactgtccctgaacagcccagggctgggaaggagattgtccatccatttgctttgtgccaagaaatgcccaagtgttctgggctctgcaaggccagtgtctccacagcctccatcagtctgtatctctgtctctgggcatcaccttttccagggtccaggaaggaagccaagatgacagctgctctcagggaatggcacgatggttcaggagcactcccaggtccaaaagtgtctcctatctccagactccctggtgcctttgattccaccattaggcctgtttccttaggggtcagcattgccctctttcttcacctgtaatttattctttttttttttttttttttttttttttttggagatggaatcttgctatgtcacccaggctagagtgcagtggcacaatctcagctcactgcaacttccgcctcccaaattcaagcaattctcctgcctcagcctcccaagtagctgggattacaggtgcctaccacagcatccagctaatttttgtatttttttttagtagaaatggggtttcaccatgttggccaggctactctcaaactcctgaccttgtgatccacccgcctcagcctcccaaagtgctgggattacaggcgtgagccaccacgcctggccttttcttttcttttcttttcttttttgagacaagagttttgctctgtcgcccaggctggagtgcagtggcacaatcttggctcactgcaacctccacctcctgggttcaagcaattctcctgcctcagcctcccaagtaactgggactataggcacacgccaccacacccggctaatttttgtatttttagtagagacaggatttcaccacgttggccaggctggtctcaaactcctgacctcaaatgatccacccgcctcggcctcccaaagtgctgggattacaggcgtgagccaccgcgcccggccttttaatttattcttttctgtttctctctgggcccaagtccccgactcagctctgaggggggtgcccaaaccttcacatgagggtcctcagagggcctttggggcagagaagtggacagcaatttaggagacatgccaagctcagcccttggctgggcggaggaggctttgcagagctgagcctggagctaaatctgtgaatgggggggatgggctcagagaaggcagcctgacggttcctgctgaggaaaggacgtgggattttcccaaaactctatcctcatttttttccggaggtccaaacctcccctggacaagtgagagcggatgggaaggggcaggagagccagggaggtggtccttgccagcttagctcagggatgtctctgccctttcctggacaagcccacccagacccaggctgcccccatgaccccacacgacacctgtctggctccttctccaccagttttcccttttgccttccaagatggagcctccacctgggtgtctctcaggcacctcccacccaacatttcacaactgaatttggctcattcctcctgacctggatcttctcctctgatgcgccatgtcagatggccccgccatccctccaggccctcccaccgggactcctccttctcctttacctcccgtggctggtcctgcagaccccatgatactggcacctgtctgtgctgccccctcctctttatccgtgaccacccaggctcagacatcaccacctatcacctgggcttcccaaaggcctcctcatggtctccctgctgtcagcctctcctctaatccgtcatccacgcagatcccccagagtcacctctccagaaggcacatctcaccatgccctccctcccacaaaaaatccctccatggctccccactgccctgaggattatccaagttccttgactgacccccaggactcagctccagtgggactcgcctccccaaagactcctctactggccggtacttcagctacaccagactcctcacctcagtggccccactctgagccatggctctcatgtccctctgcccagatgcactttttccttcctctccacatcctctctagcaccacctcctccaggaagtcccctgagactgcctacaggatcagaataacctgccactcttcaggccccacggggctagttcacctctctgtggtcacttcccactctctcctcgactcccctttcaccagactgtgagcagacgtgggcatttttctctccatgtcccaaactccttatcctgagcccaaccctggggctggtacacaggacacctcaatgattatagctccaactaacagaggggaagcaccaagctcagccctggcccaaagggggcctgggatacaggcagaggaggcagggccaccccgggttcaagggacgcacaggtgaagtgggctgggggacagcgtgagaggcacccaatgagctgggggtgcagaatctataatggaggcagcggaggggcgggatgggtgaccctagagaggtcctttctctgctccaggtctcctccacgtccccagcgaagaagtaaagctgatcatcccagccctgcccagttcccaggggctccgtggagtgatgaggacaatgatgatggtgaaggtcacagaaacactctcaatgccaacacatgctgagcgctgaccgcgtgccaggcgctgcactgagcactttgttgacttgatcccaattaaccatcatcctatagttggtgccattgccggtgtccccattccaaaggtggagttcaagagcttgaataacccggctgggtgcagagtggatggaaagccatgggtgtgtgtgtggaaaacgtgcccaacagaggctccgggtcacctggaacttccagccagcattttgctcctcgtctcaagggtggctccagccatccctcacctccctcaggagccctcctgactgctcctgcctcagcacccccgatccctccaaggaggcttccctaattgtgccagtcacactgactaccccagctcagccccctgagtgtgctgtgctccccaccgcaccatcccctagtcatacctcgccgggcaccgggccaccccgggcgagactgagagtctcaggtctccccaaggcaagggctccctgggggggtgccaggcccccactcgtgcccctcacagtgccgcagtccgtgtcccgagctctccaaacccacctcttctttgtgggggtgatctccgccggcctcttctctggcaggatggcagggttcccactgggggcagcaactctcttgcccatgagaggcaccatctccttggggtgggctttcatggctggaatacaaccacagggcagatgctcaggccggggggacagggggagcttcagggagtttaggggccccatgtggctgcatccagctcccgttcacactacctggaactggaagctcactcctcccttcccagttcaccaatccttcttcaaggacagagaagctgtccccaaagcttccccagctccctgctctagcacccccaaatgctatggtcctaggagagcccagcagggtgtcccagtagagaccaccatgcccctgtcctctctcatgacaccctccccagccaaccagtccccaggtggacccctgaactagtggagagtccagcagggtgtcccggtagagaccaccatgcccctgtcctctctcatgacaccctctccagctgaccagtcccaggcggactcctaagcactagctctgctttcctgaggtccctctccgattttgtgatgagcagctctccaagagttttgacctccacagagcaagattatcacctcctttgctctagatgttatgctcctagtaacacagccttaagctcctcaggtgttttggattcctcagtgtccaggtggtctctgcagccaacacaccgatcatctcccccgcccacccaaagctgtgtgtaaccagcttatggctgcctgtccattagattcccctctcacctgcagggagcagctgagtccccttgccccaggcagaggaggccgaccccccagtccagacctgctttactgatgctcaatgtgggctgggcaccgtgctgagctccgaggggtgtggggattggggaagggggactgatacatcttccaacaagaccaggatagaccgtacaggctgctgtgtggaggaaggacaagccgggcagaggacagagcctgggagggtcaggagtggcaggagtggggggagctgctgtggccagagaacctggggagctcatggggaccctgccagcgaaagccatgcgggcaggctgggccctgtatagtcctcgaacaccgcataagagctgtggcttcaggcaggcacagtggctcacacctgtaatcccagcactttgggaggccaaggtgggcagattgcctgagctcaggagttcaagaccagcctgggcaacatggtgaaaccccgtctctactaaaatacaaaaaattagccgggcatggtggtacatgcctgtagtcccagctagtcgggaggctgaggcaggagaatcacttgaatccaggaggcagaggttggattgagccgagattgtgccactgcactccagcctgggcgacagagcgagactccgtctcaaaaaaaatgaaaaaaaaaaaaaataaagtttttattaaacataaaaaaggagctatggctgacccctgggggcagctgggagttgggtgcagaggctctgggttacataggagagcgcgggctgcgttggggggtgggggagaccagaagccaggggccaggaggaggctgctgcaggggccatagggacggggaagggggccagctggccacagagggatgacatgggcggggaaagggctgtgtggacaggtggtgactgtgtggtcagggggtgccactctcagcttgaatcatcctcaggggactcacctggcgacacataggtgggggcaggaagacggatttctgtaagaagaacccagctgggtggggtggagctggggccactggtgatcctaccccaataggaaagcttcctggaggaagtttccggagccaggtgtcatcaggctggagagagtcccccgccctccaactcaaagggagcaggctcaggatggaggaggcatcggcgagggagagctttggccctggagcgtaggcaaccttgaggccaggcaggtggagtagcccacagagagggactcctgggcacccggccctcccgtgtccagtcacggcctgatgaggatgggcagcctctatggctttccccatccccacgtggcctttggtggactaaaaggctgggatgcaccgagcgtgaaggagacagaagaagggcacgtctcttgcccctcccagggcctctggtttcctttctgagaagtgggctgaatggtccccaaggactctgtggccctgagagctggttgctctctctcttctctgggcccgagaatgtggcctgccctgggcctctggggcaggagaggctcagggaactctggactagggccgcagcagctatcattagctccctgagtcaccccgtaaaccccacgttctcacctgctggactctcttgttgccctggccctccctctctctcccaatccctgacactgattgaaatggcctttcccgggcgacagaccaggccgcggagccacagctgctgactcagcacctgtgagatgcctgggccccgtctgtctcccacggtggggccacctcctcccatcctgaactcccatcacaatcctgccccagaaagccacctccctgggtcagcctcgggaggcaggagcctctcctctgcccccagcagtggtgagattgagatgtccctccccaggattcccaaacctcaggggaatgttcctgagtctgtaaggacctatattctcacacatccctacagccaagagtgcagccaagagtgcctccctacagccaagagtgggcccctggctggggcccaagctccttccaaccctcctcccaaggcctattggccaagggcagacatggcccagaggacctctgagggccacgctctgggctccccaggggccttggagatcaccagctgccttgtgcacagaagactcacctggtgaggttctgggtggtcgtggcaacccttgccctgagatcaccgcatgtctggggcccaaggcccccgggtgggactgtggctgaggcggcgggaagctctcattgcaggcagagggatggctggaatgaggcgtcagaggcagaactggctgagccacctgccctcggcgccaggcaggccacgcccaccagccacagctgcagcacccgcccacccacgtggcccgtgtgagtcacccccacacccacacagcagcctcatccccaccggagaaaaggcaggggaggccgcaggtgccaagatcgaagttgtgggtccaactcctccctctctggcattccatgctgggcagggactgcccatctcaggcctatttttccaactaggaaatgggaatgataacatctactttccaagggagccgtgaagagccaaagagatcacagaggtgggagggcctagtgaagagtcaagcgctctgctctgtcccctgggagggaagaccgcagcccaggcctagcctggttgacctcagggtggccagccccaagactcggcacttgttctcaaaagtcggttcctgggatcaggtctctcggggacggaagtccccatttaatgctgtccaccagcagtcacgcatcatggcccttagtgtcagcctcaccccttcctggctgaatgaccttagcaggtcatttctccgagcctcagtctcctcatctgtgaaacgtgcttcataaacccactttgcaaggttatcgtggggcttcaacaagtacaagtagaaagggccagaacaaggcccagggcacggcaagaactcaataaacaatgtcagctcttagctatgattgcttttgtcatctcaatgtattctcccagcaactgcccaggttgcccttctccaaggccagggcgtcatagaaggaatcggtgccctctctcctggcccaggctgcagctgtgaagtgggtggagtgagtcaggatggccgtgtgtgtctcgcgtcactcaggaactgcacacctgctccccggggcgagatgtggacaagacacagctgggacagagcaggaagtctctgctgacgcggccgcagctggcgcctgatgggcagggaaatccccagctgtgagcctctcaatccctcatcatcacaacctgcctggcctggggaggaggcaggaggcaggtgaggcttctaggccacgggagagcaggacctatggccggtaaggggcagaccagacttgagggtgtgggtgaagcaggagaccgcttctgccgttgaagtcagggggtcctgaagttcccactcacaatctgaaatctcatgactgtgcctgaaactcgaccggaaaagcccgatctggggttgagcacggcctccggccactagcttactcaccctctcccgacccagccccgcgccctccctgtttgcctctggcggctcagacgcctggggaggaagctgctgccaaatgtcagtgcttccattttgctcgtgttcataacttttctcagagggcaggtgggagctggtgaaaaaggcccctgtctcccacccagaggtgtgccctgtgcccagcaaggaagaaggggacccccgctctgctatgagaggcagcaggagccaggtcacccagtggagtcacagtcactacttaggaagcccgagcccatcctaatcccaccccaaacacacagaagcagcagcttcagccccttagatggtctatattcaaccccatttaacccagcacatggtgagagcccacgggagaggccgtggcaagggcgcaggtggacaacgagggattcagaactggagaaggccgtgtccaccctcgtgggccacaggggacacaggctcaggcaggaaccatgacccaccatgtgggtcatcaggacaaaatgggctgagacccccaaggcgggaggaagtccctgtgatggggtgtaggggatgagttcgggaaagagggagcatctgcctggacttggaaggagggaagaggccacaacatggtgaaaccccgtctctactaaaaatacaaaattagcggggtgaggtgctgcacactgtagtcccagctattcgggaggctgaggcaggagaattgcttgaacctaggaggcagaggttgcagtgagccgagactgcaccactgtacagcctgggcaacagagcgagactccgtttccaaaaaaaaaaaaaaaaaagaaagaaagaaaaaagaaaaagaatggaaaagtgaaaaggaatatgatcagaacaaaaatataacatgctatagtgtaaatgcatacaacacattggtcaatgctattaagtttaaattaaacacacacacacacacagagagaaacagaaaaaaagataaaagataaaatgaccacttcatactctttagaatggcccaaatccaaaatgttgacagcaccagcaaatgctggtgaggacatggagcaacaggaactctcggccatcactggtgggaatgtaaaacggtgcagccactttgaaagacactttggtggtttcttacaaaactaaacatactcttaccattcaatccagcaatcacactctttggtgtttattcaaagaagctgaaaacttatgcccacacaaaaattgcccatagatatttatagcaactttacttataattgccaaaacttggaagcaaccaaaatgtccttcagtaggtgaatggataaagagtggtacatccggccaggcgtggtggctcacgcctgtaatcccagcactttgggaggcgaaggcaggtggattgcttgaggccagcagttcaagacctggcctgggcaacatgacgaaaccccatctctacaaaaaatacaaaaaaatttgctgggcatggtggtgggtgcctgtagtcccagctactcgggaggctgaggcaggagaatggcgtgaacctgggaggcggagcttgcagtgagccgaggttgtaccgctgcactccaggctgggcgacagagcaagactccgtctcaaaaaaaaaaaaaaaaaaaaaaaaaaaaaagagtgctacatccaagagaatggaatgttatcctccaataaaagaaatgagctctcatgccacgaaaagacctggaggaaactctaatgcataatactaagtacaataaatcaatctgaaaaggctatgtattgtattgatgatgccaactacatgacatgctggaaaaggcagtaaaagatcagtggctggccaggcacggtggctcacatctgtaatcccagtatttgaggaggccaaggcaggtggattgcttgaggccaggagctcaagacctggcctgggcaacatgacgaaaccccatccctacaaaaaatacaaaaatgagccaggcgtggtggctctcacctatagtcgcagctactcaggaggctgaggtgggaggatctttgagcccaggaggtcgaggctgcagtgagccgtgattgcaccactgcacttcagcctgggcgacagagcaaaactccgtctcagaaaaaaaaaaaaaaaaaaagggtcagtgttggccgggcgcggtggctcacgcctgtaatctcagcacgttgggaggccgaggcgggcggaccgcgaggtcaggagatcgagaccatcctggctaacacagtgaaaccccgtctctactaaaaatacaaaaaattagccaggcgtggtggcgggtgcctgtagtcccagctactcgggaggctgaggcaggagaatggcatgaacctgggagatggagcttgcagtgagccaagatcacaccactgcactccagcctgggtgacagagcgagactccgtcgcaaaaaaaaaaaaaggtcggtgttgccaggagctggagagagggacggattaataggtggaggatggaggatttttaggcaataaaattcctctgtgtgatactataatgataaacgcaggtcatacatttgtcaaaacccatggaatctataaccccaagagtgaccccagtggactttgttttttgtattttggtttcttttttttttttttttgagacggagtcactctgtcgccctgactggagtaaagtgacatgacctcggctcaccacaacctctgcctcccgggttcaagtgattctcctgcctcagcctcccgagtagctggggtgacagacgtgcgtcaccacacctggctaatttttgtatttttagtagagacggggtttcaccgtgttagccaggctggtctcaaactcctgacctcaggtgatccgcccgcctcagcctcccaaagtactgggattacaggcatgagctggactttggatgataatgatgtatcaatgtcaactcactgattgtaacaatgtaccactctggggcaggatggcagtagctggggaggttgtgggcacagcaggtgtatgagaacttcctatatattttttgtgtcaattttgctgtgaacctaaagttgctcgaaaaataaagctggccaagccctgtggctggcaccgcaatgccagtactttgtggggccaaggcgggaggactgcttgaggccaggagttcaagaccagcctgagcaacatagcaagaccacatctctgcacggggaaaaaaaaattgccaggcgtggtggctcacgcttgtagacccagctactcaggaggctaaggcaggaggatcgctcgagctcaagagtttgaggctgcattgagccatgaccacaccactgtgctcccacctgggcaagagagcaagaccctgtctcaaaaaaataaaattaaaataaagcttattaattttttaaaaaagaaagacatatgaattgcaggtatatccttccttaaacaatctcaggtttccaatctaataacaaaaaatttctatcattagttttgcaaaagtacaaccacaggatcccttccagctctgagtaaatttgaaagctgatccaggctgggcacggtggctcacacctgtaatcccagtactttgggaaaccaaggcagctggatcacttgaggtcaggagttcaagaccagccccgccaacatggtgaaaccccatttctactaaaactacaaaaattagccaggcgtggtggcaggcacctgtcatccagctactaaagaggctgaggcaggggaatcccttgaacccagaaggcagaggttgcagtgagctgagatcatgccactgcactccagcctgggtgacagagcaagactctgtctcaaaaaacaaaacaaaacaaaaagctgatccaatttgcagaagtttgcagctgtctgacacccacacattttctaagaaaggcctacaggtaaagcatggagccccaggcccacagcaggaagcgagaagccctcccacctccctctggcccaggataggctggcatgccccagcacattctctgccaggcagcctgacacagcagttaagagccaggctttggagtcagactgcctggggtcaaacctaggcaacgtgtttactggctgtgcaaccttactcactgttggaaccttgattttctcatctataaaagggaactaataatagcttcttcacgagctgttaggagacttaaagggagatgcacatggagcaccttcataaacactccccacatcccggctgtcggcctccctcctccaggctccaggctcacttgccatagtcacatgcaggcaactggggctcctccgtggcgcctcctatgtggaggcagacatgatgctagagaacagggaggagggatcccagtattttctcccaaaacacctctcctggtagggcccaagcctcagcctcagccaaagttcatcctttcatgaaccaacatccaataattccacaactgaacaactcattctacactccgcagatactaacacaacctgcccagtctggaacagatctctctttcagagtatctgtttcttttttttttttcacaatgtgtttattttttatctttttttttttaatttatttttttattgatcattcttgggtgtttctcacagagggggatttggcagggtcataggacgatagtggagggaaggtcagcagataaacaagtgaacaaaggtctctggttttcctaggcagaggaccctgcggccttccgcagtgtttgtgtctctgggtacttgagattagggagtggtgatgactcttaacgagcatgctgccttcaagcatctgtttaacaaagcacatcttgcaccgcccttaatccatttaaccctgagtggacacagcacatgtttcagagagcacagggttgggggtaaggtcacagatcaacaggatcccaaggcagaagaatttttcttagtacagaacaaaatgaagtctcccatgtctacttctttctacgcagacacggcaaccatccgatttctcaatcttttccccacctttcccccttttctattccacaaaaccgccattgtcatcatggcccgttctcaatgagctgttgggcacacctcccagacggggtggtggccgggcagaggggctcctcacttcccagtaggggcggccaggcagaggcgcccctcacctcccggacggggcggctggcctggcggtgggtgacccccacctccttcctggacggggtggctgccgggcggagacgctcctcacttcccagtaggggcagctgccgggtggaggggctcctcacttctcagacggggcggctgggcagagacgctcctcacctcccagacggggtcgtggccgggcagaggcgctcctcacatcccagatggggcggcggggcagaggcgctccccacatctcagacgatgggcggccgggcggagacagtcctcactttccagacggggcagccaggcagaggggctcctcacatcccagacgatgggcggccaggcagaggctgcaagctttgcactttgggaggccaaggcaggcggctgggaggtggaggttgtagtgagccgagatcacgccactgcactccagcctgggcaccattgagcactgagtgaaccagacaccgtctgcaatcccggcacctcgggaggccgaggctggcggatcactcgcggttaggagctggagaccagcccggccaacacagcgaaacccgtctccaccaaaaaaatacgaaaaccagtcaggcgtggcggcgcgcgcctgcaatcgcaggcactgggcaggctgaggcaggagaatcaggcagggaggttgcagtgagccgagatggcagcagtacagtccagcttcggctcggcatgagagggagaccgtggaaagagagggagagggagaccatcgggagagggagaccatggggagagggagagggagagggagagggagagggagagggagagcagagtagagtatctgtttcttaagctctattctacaaaggaagagtcagcaaactcttctgtaaagggccagatagtatgttttttatattttaggtaagctttttatattttaggtaagcttatattttaggctttgcaaactatttggtctctgttgcaactattcccttctgcattatagcaggaatgcaaccataggaatgtacacacacgtacacacacacacacacaaacatgcatgcatgcacacacccacacacacacccccatgtgtatacacacgcatccacaagcagcctacacagagccaattagctatgccagcccatttcctgccacaaactttacacttgacacgatatatatgtatacatatctgtttatttgaggatgccagtatggatggagtggaagcatgtgccattgcggagaagcaggactggggttcctagaaatggaagatctttcaaacattcttaccaggtacctttgggatgtggttctgtagttttaacctgcacagcaattgagctgatcttctggagactgtgattgatcgtaaggaaggatgaagaaggcactgctgcaacagcttgattctgccagagctgggagtgggacagcctcccccatcttctccagggaggaaacaccaacacccccaaaccacccgggcaggtaagaggagcaagcacggcacagagaggaagggcctctgcattttccatcaaaggaagagtttgttcccaaaggtgttttcctgggcttcatttacttttgctcctaataatataaaatcaaagaaggccgagcgcagcggctcacacctgtaatcccagcactttgggaggccaaggcgggcagatcacctgaggtcaagagttcgagaccagcctggccaacatggtgaaaccccgtctctattaaaaatacaaaaattagccgggcgtggtagtgctcacctgtaatccaagctacttgggagactgaagcagaagaatcgcttgaacccgggaggcagaagttgcagtgagccaagatcacaccactgcactccagcctgggcaacaagagtgaaactctgtctcacagaaaaaaaaaaaaagaataaaatcaaagaaaacagccaggtgtggaggctcacacctgtaatcccagcactttgggaggccgaggtgggcggatcacctgaggtcaggagttcgagaccagcctggccaacatggcgaaaccccatatctattaaaaaaatacaaaaaattagccagacatggtggcacgtgcctgtaatcccagctacttgggaagccgaggcaggagaattgctggaatccaggaggcggaggttgcagggagccaaaattgtgccactgcattccagcctgggtgagaagagtgaaattctgtctcaaaaaaaagaataaaatcaaagaaaacaagggcctaacatgtcccagtagagactgaccatccaaactgtttagtaaagtgagtaaaaacctgaaagtctgttaggagattcacttggggacagtgacggttggatgtacatcactccccatgcttccaagaacgcttcccacagcttgtccagcacagatttgggaacatgctgggcaggcacagaccaggccaggctgctgacagagcactggtgttccctcagcagccccccgtggcaacggggtctcctaaggcccagtgttgacagtgctgtctgcgtgacgtcctcacttctccccggaagcggcaggactcttgaagacctcagcgtcctctggcttcagagaccctgaaaactgtcgcagataaacttcctcgggctgagcagactgcctatctcgagcacttgcctctcttaaaagggggaccagggcaaagttcttccagtgtctgcctgaaactgaagggtaacactattactaccttggatgcaacaaaacaaacattcacttcttggcctcccaagtctccagataaaaggaggtccaagacaggcacgatggctcatgcctgtaatcccagcactttgggaggccgaggcaggtggatcacctgaggtcaggagttcaagaccagcccggacaacatggtgaaaccccatctctactaaaaatacaaaaaaaaaaaaaaaaattggccgggcatagtggcacatgcctgtaaccccagtacttgggaggctgaggcaggagaatcacttgaacctgggaggcacaggctgcagtgagccgagatcgtgccactgcactccagcctgggcgaaaagagcaaaactccgtctcaaaaaaaaaaaaaaaaaaaaaagaagaagaagaagaaagaaagaaagaaaaaacgaggcccaggcatgcgagtgcttcctgaggcacctggatcggtgcaatgtcctcctccctcaactactcaaagagcctcatgcactctcgctgttccttaaattctcttcctccatcccaccccgacttgcttgcagcctcaggagagcccatcgcctgcccctctcggcctccatctcctccctgccccagcgggagggagagagggtctccacagagcaacgccgaggcctgtcctgtgagtggctcaacaccagggcagctctgggtgacgagcaccagccaaagaggcaggatctggggtccaggcccactgggtgacagcctgggcgacagaacaagattctgtctcaaaaaaaaaaaaaagaaaaaaattataaaggtgacatcaggcaacctccaaccatcccccatccctgccccagttaacatgggtgtgtatacccctgccactgggtcaatgtctttataaatatcacagtgaatgtgcagtgttgtaaaccgccaacactgtcatgcaaacataatacaaatcaactgccaagtgaaatagcaaatcttgtcaaagatgtaggatgtcactaaatcaacaagagtgacattgaaaaactactcaaggccgggcgcggtggctcacgcctgtaatcccagcactgtgggaggccgaggcgggcggatcacgaggtcaggagatcgagaccatcctggctaacatggtgaaaccccgtctctactaaaaatacaaaaaattagccgggcgtagtggcgggcgcctgtagtcccagctactcgggaggctgaagcaggagaatggcgtgaacccgggaggtggagcttgcagtgagccaagattgcgccactgcactccagcctgggtgacagagccagactccgtctcaaaaaaaaaaaaaaaagaaaagaaaagaaaaactactcaaatcacacgcaaagctatctttcaatagctctctggcaaagttagaccagttaacaactgacaaagagatcatcaataagcattattacaggatgcagggattgcttccaactaaactcacaggaaaatcacacgatcgcaggaggcctgtggaaaaaccaatggaaccctcgagcagttttctaaaaatgagcctttgataaaatagattttcgcttccagctataatggagtatctagtactgggctagccatcgtgctgtcaacgatcacaaaataggcaacatacaggcagcaaacgtttttcagagataggacatcaggcagtgaaaaacggcagtccctcaaataacaccaacttagcagctaaagattttttaaaattaaacattaaaaaaaggcaaggcacggtggctcgcacctgtcatcccaacactttgggagaccaaggtgcgcagatcacctgagatcaggagttcgagaccagcctggccaacacggtgaagccctgtctctactaaaaatacaaaaattagccaggtgtacacatatacaccgtggaatactatgcagccataacaaaatgatgagttcatgtcctttgtagggacatgggtgaagctggaaaccatcattctcagcaaactattgcaaggacaaaaaacgaaacaccacatgttctcactcataggtgggaattgaacaatgagaacactcagacacaggaagggggacatcacacaccggggcctgttgtggggttgggggagtggggagggacagcattagaagatatacctaatgtaaatgacgagttaatgggtgcagcacaccaacatggcacatgtatacatatgtaacaaacctgcacgttgtgcacatgtaccctagaacttaaagtataataaaaaaaaaaattagccgggtatagtggcaggcgcctgtagtcccaggtactcaggaggctgaggtgggaggatcacttgaacccagaaggcggaggttgcagtgagccaagatcgtgccactgcactccagcctgggcaacacagcaagactccatctcaaaaataaaataaaataaataaaaactgcaattcccaagagaagtgaaattcacaaggggagccctgtgatctccctaactttctgcctagggacatttccccaactacaacgcggtgagctgcagtctaagaagagcatggaattgcctttgagttaaagaagaagaaatcaaaagctgggcagcggaagcagctagaatctgtggatcagagcacaggggaagaggaggaaggattcatgggggtggaagcccagaagtctttggggcagatgagttccccacaggtccttgctaagagctgagctgtgctagctcatggtgtgactgcatgagggtgatcagagagtggctcagagtatttaaagggtgttaagaaggtctctgggcctctgaggcccccagtactactcaacctttaacgtctctgtcccactttcataaagatagaaaacagaataggggccaaggggttaggggccaggggccaagtggtcagggaggaggggccaaggggtcagggaggaggggccaaggggtcagggaggaggggccaagcggtcagggaggaggggccaagcggtcagggaggaggggccaagcggtcaggaaggaggggtcatggagttgttttaagggcacagagtttccgtgtgggatgattaaaatgttctggaaaaaggcccggcatggtggctcacacctgtcatcccagcactttgggatgacctgaggtcaggagaccaacctggccaacatggtgaaaacccgtttctactataaaaatacaaaaatgagccgggcgtggtggcaggcacctgtaatcccagctactcgggagactgaggcaggagaatcgcttgaacccgggaggcggagggtgcagtaaacccagatcacgccactgcactccagcctgggcaacagagtgagactccatctcaggaaaaaaaaaaaaaaaagttctggaaatagatagtggtgagtgttgtacaataatgtaaatgtacttaatgacactaaactgtacacttcaaaaggatttaaatggcaagttttaggagatagatattttaccacaattttttacaattaaatacaaagtaattcaaaaacaaagtgttcagggttgtaattataactcaaaatttgtccactataaactatgcctctttcatttctaggtaaacgtcctcaattagacatttatttaatgttttctattaaatgtttaccagtaactgttaaacagctttctttctggtagtaatttttctcagggtttttctatttgttcttttttttgagacagagtctcgttctgttgccccggctggagtgtagtggtgcgatctcggctcactgcaacctccgcctcccaggttcaaccgattctcctgcttcagcctcccgagtagctgggattacaggtgcctgccaccatgcctggctaatttttgtattttttttagtagagatggggtttcacgatgttggccaagctggtctcaaactcccggcctcaggtgatccacccgtctcagcctcccaaagtgctgggatgacaggcgtgagccactgtgcccggcctccttggggtttttctgctcaaggcatcccctttcttcttctcaccctcccctcttctccacctgcccagatgtgtccatgagtgacaagtgttcccgtctgcctgtttgtgtccgcacagcctctcagagctaggacgtcgcatgcacacgtgcagagtgaggaacagggctgaggaggcagggcagcccatacaaggaggcagggcggggctgggctgcgtcccctggggcgctgaggacaggtgcctgggctggaggtgctggcacagccgcctgcacgggcccagtgagccgtcagccatcagccgtcagccgtgacagcatgagtgaggtgctcaagtcagcccgtgactatgtgctcatggccgacgtcaggagctgccacagcgcccgggtcctggggggatgaggaacccggcaaggcgtggggaacctgcaaagctccccctgcccaacatcaggccaccagccaaggaggcgccaagcaccggccctcacgcctcacctctgcttgaccgcagggagaagctcagggtgcgcttgacgccctcacagttgcccgggtcttcgttgatgatgcccacgttggtgttccaggtggtccagttcacctcgtccaccctgcagggtaaggggtcgggagagcctgagagctgtgcccagcttcccgggccaagggctctgcccacaggccaagcccaagaaacccacccatcaggatggagatgtggtgggtcggggagggcagagaggacttgatttttggacaccatcctcaaagatgtgatctctgagcacactgtgaggcccagggggacttcacatattggatgccaggctctgacgctgctcactagacggccccttctggacacctcgaattttccagaatttagtgtctgggccccaccagatgagatctaagatggtcccctgtgcacgcccacagctgagctcaggacggccccaatccctacagctggcattgggagagccccctgtgctcatgaccagcccctcatggaggccctgaggcaggctctgtgtccacaggtgagccccaaagctcccaagccctgattcaggtggagcctgggcattacctgaagcaccaccggtagtcgtccttgccatcaggtgtgtaccccacctgcagcagcttgcctgagcggaaggccttcctcatgcacttaaggaagctcttctccgtgtccaggatggtgatggctctctgcaggaagacaccaagggcagaggagctgaggggcagagggtgcatcccggggccaccctggctgccagtatccagctccccaggggctctcccaggcctagatgcctccagggtggttgtccagtgccctccacgctagctttgtttctgtagcctggcgggggtacactgtatacaaggggcacagcccagccagcccagacctgtccaggtgccactggtgcctgccgggcctgggcagggcagccccgggagtgatacggaggccccagaccctgccctgaggagctcacaaggggcaacatagggtagggctgagagcagggccacgagtgagactgcctgggccaggtcctggctctgccacttaccagccatgtggccttgagcacagatacctaacttcactacgcctcagtgcctcattcattcaaaaacggaacagtatagccaggcacagtggctcacgcctgtgatcccagcactttgggaggccaaggcaggcagatcacctgaggtcaggagttcaaaaccagcctggccaacatggtgaaaccccatctctactaaaaatacaaaaattagctgggtgtggtggtgggtgcctgcaatcccagctactagggaggctgaggcagaagaaccgcttgaagtcgggaggcagaggttgcagtcagccaagatcatgccaatgcactccagcctgggtgacagagtaagactccatctcagaaaaaaaaaaaaaaaaaaaaaaaaaggaacagtaatagaatccacttcacaggactgttgtgaggattaaatgagatcaggtgagacagacacttagtacagtccctatcacagagaaagtgcttcttcataagaacgaaacttattattagtagttggggatgcagatgtggcccacggggccagaaatgtagctgtcagggccctgcctcatggtagctgctcccctgagtctggcctctggtgcccaccttacaccaggctcctctgaggtggacaccctgtcgggctgagccctcccccttcttccctccaggaccacccagaccacagccaagcacggtgtctataaacaccagctgagctcatctgcccctgagcaggtgctgggcaggggaacttgctggaagtccactgagggaggtgctgaggctggatccccgggcctggccgggctttctgctccctcctcaaatcctgcagggctcatgtgcccagctgggtaaggcagcggatagagaggcccataccctcctggccacacaccgcccccaccacccacccacctgcagccagctgtgtaagacagcagacagagccgcccacactctccgcgccactcaccaccccccaactccacccacccacctgcagcttccagatgttcttgctctcctgtgcgatcttgttgacagtctcacccatgagggcgatgagcatgttgagcaggaggatgtaggtgagaattacataggccagcagcaggatgatgaagacagccttgaagtcatagttctcagtgaactccaggtcgcccatgccgatggtgaacttgaacagctccaggcaggtggagtacaggctgttgtaggagctatcggggggcctgcaggcaggcccccgccacctgtgcgacgtggactcagacggcagggagtcattcttcccgtcttcaatcagcgtcaccaccgctacagggcacagggagggcggggtgccactggatagaagccaatatcccaagtcccctgacatacaccctcctgctcagtcagtctcaaataactttgtgacaagttatttttaaagcatcccttctttaaaactatcaaaaaaattttcatagtatatttttaagaactttatcatcatctgctagaaaaataaataaatatataagtctctatgtgcaatgtgaatacagccacctttgtacagtgcacaacctgcttaaccatacgtgtcagctctggccccacacctgctttgtccatcacaccctgttggcctgcatccctcagaggtccattttgctccatgagcactgagccgctcagagcagaatgacctctccccacatgctgcctgcttctgtgggaagtgtggcccagagcctgagagcctctgcagcagctgtgcatcgtggttgctgcctatcagtatccacaaacccccccggcctagtcccttcctgtacctactgaaatgcagggccttcagatccaggtgccagagcccacacctattaggtctctcttagtcacaggtgcccatccctcccagccagggattccaacgcaaacggcagggtggggacagggagggtgcaccatgtgaaccacgtaactgtgggactcggatgagcatcaaagcagagtccagtgctcaaaaaatgatgtggaggccgggcatggtggctcacgcctgtaatcccagcactttgggaggctgaggcaggcggatcacctgaggtcaggagtttgagaccagcctggccaacagggtgaaacccgtctctactaaaaatagccaggttgggattatcctagctacttgggaggctgaggcaggagaattgcttgaacctgggaggcagagtttgcagatcgcgccactgcactccagcctgggcgacagaacgagactctatctcaaaaaaaaaaaaaaaaaaaaaagatgtggacatgtgaaaagagcacaggagccagctggaagggactccagtgactaatctcagacaatttgagtattaaaataaaagaggatagtaaggattataacccatttaacaaagtgagaatccatgaaaacaaaagactccatgaggccattctgatacaaacaaatacatagaaatggggaatggttagctcttctctataacagaatgccaggtaataaatgcagaagcaatgatggagttagaagatcatcttctctgggtgtggtggctcatgcctgtaatcccagcacttcgggaggccaaggcaggcggatcacctgaggtcaggagtttgagaccagcctgagtaacatggtaaaaccccatctgtactaaaaatataaaaattagccgggcgtgatgatgggcagctgtgatcccagctacctggaaggctgaggcaggagaattgcttgaacctgggaggccgaggttgcagtgagcagagatggcaccactgcatgccagcctgggcgacagacagagactccttctcaagaaaaaaaaaaaaaatcatcatttggccaccatcacaggatgaagtgattcaggtaagactcatcaacggatgctagaactcctggtgaaagtctgatgagaaacaggctagtcacatagtttcaaagcatctccttgaaaagtatccatcacaaaggtaaatatagtagctttacagtggaaaagtctggcagatccaccaaaaccaagtcatcaaagctaacgtcaccagaagtgagacggacatcatgtgactcccaataaaacacacagcagaagacacacatggcttcttgatattctggccaaaaatgcatgcctggctataatcgtgaggaaacatcagacacacccaaattgagaaacattgtcaaaaccactggcctctactcattacaaattctgaggtcgcaaatgacaaggaatgatgcaggaagtgccctggattaaagaagactaaggtcaggcgcggtggctcaccctgtcatcctagcactttgggagccgaggcgggcagatcacttgaggtcaggagctcaagaccaacatgacaaaaccccgtctctactaaaaatacaaaaaaaaaaaatagccaggtgtggtggcgggcatctgtaatcccagctactggggaggctgaggcacaagaatcacttgaaccctggaagtggaggttgtagtgagctgagatggcgccactgcactccagcctgggcaacagcatgagactctgtctcaaaaaataattaatggccaggcactgtggctcatgcctgtaatcccagcactttgggaggccaaggtgggtggatcacctcaggtcaggagtttgagaccagcctggccaatatggtaaaaccccatctctattaaaaatataacaactagccaggtgcagtggctcatgcctgtaatcccagcactttgggaggccgaggcaggcggatcacgaggtcaggagatcgagaccatcctggctaacatggtgaaaccccatctctactaaaaatacaaaaaattagccaggcgtggtagcaggcacttgtagtcccaggtactcgggaggctgaggcaggagaatggcgtgaacccgggaggcggagcctccagtgagccgagatcgcgccactgcacgccagcctgggcaagagagctagactctgtatgagaaaaaaaaaaaaaaaatatatatatatatatatatatgcataaaaactagccgggcatggtcgtgggcgcctgtaatcccagctacttgggaggctgaggtaggagaattgcttgaacccaggaggcagaggttgcagtgagccaaggtcgtgccactgcactccagccttggcgacagagtgagactccatctcaaaaaaaaaaaaaaaaaaaaaagttgaaaaaacaactgagccaaaatgctatgtggcagccacagcacttccagcctggaaaattcttaaagcattttatataacacgtggccaagtcctggagctcatttcagtgtgtcctctgtccaccctctcagtcacctgcagacatgcacctgcctacccagtgccttctcattcagctcctggcagagtcttcagaaggctcagccaagcaggacccctgccctcccccagcgctgaccaagctcattacctgtggaaaacccgaacaagaagacgatgtagacaaacatgaaacggcacaggtctctcaggatcatctgcaggagacagcaggctcatcagagccgaggccaggcccaggaggagctgagggaagggccgggccgcatcggcctggggatgcgtcttgagaacgtgcagggcggtttgctttgctggttctcagctcaggggtcatgagggagtcacccacccttcccccatagcctttgttctggtcgggagatggaggcctggtgtgcagggggggtcaggtttcaggggacccccctacacatacctgggtcagggccagattgcttgattcttggaaaataggctggggggtaaaccagccccttcccaggcacgacagagaggatgggcggagttcttggccccatctcacatgaccacgaggtaagcgggctctgaggagacccactggggcccagggaacccaccttctctatcatgacggcatagatgcccatctgctggaaaccgcgggtgtagtagagcatgttggtccagcccaaggccagggagaataccatggaagccacatactccttgaggtggctgaagtacagcaccacggtggccagcatgaacagtgactgcagaaagctgcgggtggaggggcagaaagctccgtctacgggaacccaggaggcctggcacccccagaacaaaaggtcacaggccgctcagaggtccagactgcaggccgcaataggagctagggttgggctgtcctgactctttcagcccaggcgttctccgtggaagcagcatcgtccccaaggagcagaaattggcttggtgaggagctgtgcaaaatctcactctttatgtataaagcacagatataaatatagtacctaaaggccaggcgcagtagctcacgcctttaatcccagctctttgggaggctgaggcatgcggagcacaaggtcaggagttcgaggccagcctgaccaacatggtgaagccccacctctactaaaaatacaaaaaaaaatttagccaggcatggtggtgcacgcctgtaatcccagctactcaggaggctgaggcaggagaatcacctgaacccgggaggcggaggttacagtgagccaagatcatgccactgcactccagcctgggagacagagcgagactccgtctcaaataaataaataaacaaataaataaacaaataaataaataaataaaaagtacataaaaggatatatagtggccaggcgtgatggctcacacctgtcatcccagaactttgggaggcagatcacttgaggtcaggagttcaagaccagcctggccaacacagtgaaaccctgtctctactaaaaatatgaaaattacctgggcaaggtgcacccctctaatcccagctactggggacactgaggcaggagaatcacaatgctatgtagaaaactgcttctcttaggcaggtaaatcagtgtggtaaacctacagaccttgcctcttgagtttgcctttcggggctaaagtataggtatctcaagattagggggaaaacagaggaaaagaacccattctaccaaaaagatgcctgcactcctgtgtttatcaaagcactattcacaatagcaaagcatggaatcaatccaggtgcccatcaatggtagactggataatcaaaaagtggtacgtatataccatggaatactatgcagccataaaaaagaatgaaatcacgtcctttgcagcaacatggatgtagctggaggccattatcctaagcaaattaacacagaaacagaaaaccaaatcccacatgttcttacttataagtggagcaaaacactgggcacccacaagcacaaagacgggaacaacaaacacttaggattccaaaagtggggaagccgggagggggacaagggttgaaaaactacctatcaggtactatgttcactacttgggtgaccagatcattagacccccagacctcagcatcatacaatatacccacctaacaaacctgcacaagtaccctgaaatctaaattcttttaaaaaaattaaaataagtgttcctttcacaatcatgttaaataaagctaattctagttttacttgtccaaaaaaaaaaattgggttaaaggatgcggtttgtgagtcgtacggacaagctagctgcaagaggatttgaaattattccttgttcttccaggaaggaagagatcaggacggggactgtgagccgagatcccaggagacaggtcctggaaggccctcggtgcacactggggcttgaggctctggcttactttctgaaggaaggaggtttcctgccacatccacaatgttctatttatttatttagagatggaatctcgctctgttacctaggctggaatgcaatggcgcgatctgggctcactgcaacctctgtctcccgggtacaaacaattctcccacctcagcctcccgagtagctgggattacaggtgcgtgccaccatgcctgcctaatttttgtatttttagtagagacggggtttcaccatgttggccagtctggtcttgaactcatgacctcaagtgatccacccgcctcagcctcccaaagtgctgggattacaggcgtgagccactgcgcccggccatccaaactgttctataactgtgctttcactcatctgcttcctcctaaagcggtggttctcaaccgggagtgattccggcaccaccccccaaaacaagtgaggggcctttggccatatctggaaatgttcttgattgtcaagactgggggatggggaagctccaggcgactgggggatggggaagctccaggcagctgcgagtagaggccggtgatgctgctatatactctacgatgcacagggcagcccccgccccgccccgccccccaaccaccacaactaagcactacccagtccaaaatatcaacagtgccaaggtcgcacaaccccccgttaaagataggaaactccccaaaggcgggcgccatgtctgtttcatccagtattccagggccaacccctcgaatggcagatggatggacaatgagtgggaaggtgaacaaggtccgtctcactcggactgtaagtcacggcagtttctcgatccctggcccctggcacagagcaggccctcagtattcattcatcccccgagtatgtattcagtgccttccgtcattccctcagcatgttcactgaggtcccactatgtgccaggcccggcgtgagtgagacctcaagtgagaactgattgcggtcacctggggactggactgggaatgagtcaaagtgtcacttacaaaagcatctcactgtagctgtccacaaacagggtcttcatcgacggccgcctctgcaggaaatactgaatctgcaggtaaacagagagagtaagatcccaggcaatgctcgatgtggctaaatggtgagcactcagatgcttcctaaatggcaccatgatggggtggtcgaatgtgtgaaagcacagattgtgaaaagagcagaacagcaagggtcaggccaatggggtgacactaggtggcccagtcagtagagatggttaaaaatacacagtggaagccgggcatggtggctcacgcctgtcatcccagcactttgggaggccaaggcgggtggatcacctgaggttaggagttcgagaccagcctggccaacatggtgaaatcccgtctctactaaaaatacaaaacaattagctgcgcgtggtggcgggcacctgtaatcccagctactcatgaggctgaggcaagaaaatcgcttgaacccaggaggcagaggctgcagtgagccaagatcaggccattgcactccagcctgggtgacagcgagactccatctcaaaaaaaaaaaaaaaaattacacagtggatttacaactatacccagaagtacagacaggaaggaaaatcattaaaatgttatcagttgctgtattgaattgggcaaattgttttcttctaattggagctttttcctaatttttttttaagagatcagagtctcactatgttgcccaagctggtctcaaactcctggcctcagcctcccaagtagctgggattacaagcgtgagccacctttttcttaatttttcacatgccgagcatatttttttcttaattttaagtaagcgttaaaataaaaattcttgtaacaagccgccactgtcagccatgagtcctgtccaagacaccaccacccttctgctccctcccacaggccaatcctgcttttgccattccagccacacttgctactgtggcactgtactttactgtaatgtaaaccatgagtgtgaaaagaaagacagttgtctctgtgaagacgaagttcaatgactgaacaattccataaaggtgagtgactgaaaaaaaaaactggatagagcttataccaaaaaagactaggggataaaaatcacaatagaaggctgggcacagtggctcacgcctgtaatcccagcactttgggaggccgaggcgggcggatcacgaggtcaggagaccgagaccatcctggttaacatggtgaaaccccgtctctactaaaaatacaaaaattagccgggcgcggtggcacgcacctgtagtcccagctactcgggaggctgaggcaggagaatcacttgaacccaggaggtggaggttgcagtgagccaagatcacaccactgcactccagcctgggcaactaagcgagactccatctcagaaaaaaaaaaaaatcacaatggggccaggcacagtggctcacacctgtaatcccagcactttgggaggccaaggtgggcggatcacgaggtcaggagatcgagaccatcctggctaacacggtgaaaccccgtctctactaaaaatacaaaaaattagccgggcgtggtggcgggtgcctgtagtcccagctactcgggaggctgaggcaggagaatggcgtgaacccaggaggcggagcttgcagtgagtggagattgtgccactgcactccagcctgggcgaaagagtgagactccatctcaaaaaaaaaaaaaaaaaaaaaaaaatcacagtggagcctgggcatggtgatggcttcctgtagttccagctactccagaggctgaggtgggaggattgcttgagcccaggagacagaggttgaagtgagccacgatcacgccactgcactccagcctgggtgacacagcaagaccccatcttataaaaattaaaattaaaatactacaagggtttccagagtcaaaaaaaacaaaaacaaaaaccaatgatcatctcaaattctacattcagacttttttgtacgcagctaagttctcactcttctttaaagaagctgaaactagaaatcttagattatataaatatggtttttgcaagaaaggtgatgtaaaatctgaaacagtgagtcccacattcaaagaaaagattactcctgcattaaaaaaaaaaaaaatggccaaggattgcacatgtttgagtttcaggttaaaaataaaacaattccttgctggtgtggtggctcacgcctgtaatcccagcactttgggaggctgaggcaggtggatcacctgaggtcaggagttcgagaccagcctggccaacatggtgaaaccccacctctactaaaaatacaaaaaaattagccggctgtggtggcaggcgcctgtaatcccagctactcaggagaattttttgaacccaagaggcggaggttgcagtgagccgagatcgtgccactagcctccagcctagatgacaaagcgaaactccacctcaaaaaaaaaaaaaaaagattccagtatgcaaggagatttccttcactgctcagagctttaacagattggtttaattaaaaaactaccagtcatgatcctatcacttaagaggcctccactctgcccctgtaatcaaatactccgttccgtggagtggctggagtgtctactttcaagcttgcctgccttgggcctgtggagacgccctgagcaccctcccgccccgcggtgactgactgaagggctctcatcttcacctctgcgtctctcagctccccaagtagggctatgatgtgtctgatgaattaaaaagtgagtgagcgctgagggatcttcttggctttttgttttggtgataatggaaactcacaatgtgggaaggaacgcttacccctcggaaaaagaagtagactcctcctaacacagacaggatctctccagtaactcggaaatagtctccagttttttccatcttaaagggaggctgtgagatgcagagaagttggtaactccatttactcattcgttcattcaacaaacatggaccaggtccatgaagccatagtccctgcccaggaggcacagcctccatcaggggaaggacacacaaagacagtgtgttattaggggagcgcccgcaaggaggcccctctgtgggcctgattccccaaagtggcagcctgcaggtgccaagcggagcatcttacaatgctgtgccgcctcccaagcaatgtcccggcaggcccagagctcctcctggctgggagcagagtgatggacagcagggtgatggagaggtggaagcactctcatggaccccacgccatacacatcccgctgccaccccagcccatggccagtctcccacgagtgtcagggactcccactgaccatggagggagagactgtgccacacacacttgtgggtgtcacccttgtatttcagtggccatttcctggagtgggtcaccatccacatttcctaagcactagttcatcagcttgccttaccagcacatttttctcttaaaaagaagtcactggccgggtgcagtggctcacgcctgtaatcccagcactttgggaggccgaggcgggcggatcacctgaggtcgagagttcgagaccagcctgaccaacatggagaaaccccatctctactaaaaatacaaaattagccaggcgtggtagctcatggctgtaatcccagctacttgggagacagaagaatcacttgaaccccggagccagaggttgcggtgagccaaggtggcgccactgcactccagcctgggcaacagagcgagactctgtctcaaaaaacaaaaaacaaaaaacaaaaaaaaagagggaggctgaggcaggagaatggcgtgaacccaggaggcagagcttgcagtgagctgagatcacaccactgcactccagcctggaaaacagagagagactctgtctcaaaaaaaaaaaaaataaaataaaaaaaaaaggaagtcattatgtggccttaataggtggacagaaatcgggtttcatgcaattatgaagttgagtttttaaagtaaatgtgcagccgggcacggtggctcacacctgtaatccaagcactttgggaggccgaggcaggcgatcacttgaggtcaggagttcaagactagcctggccaatacggtgaaatcccatctctactaaaaatataaaaataagcttggcatgttggtgggtgcctgtagtcccagctattcgggaggccgaggcagaagagtcacttgaacccgggaggtggaggttgcagtgagcagagattgcgccactgcactccagcctgggtgatagagcgagactccatctcaaaaaaacaaaaattaagtaagtaagtaaacttgtaaagtgccctggaaacaaaagcagcaaattaagtgtcctgggtatcagacacgaaggactaagtccagaagtttgatgaagtcttggctcttggcagaggaaaaaggctggtcttaggctgatttgatggatggcccagggcctggcacagagctgctcaaaagtctaaatccagggaatgaataatgagcaagtgagtgaatgaaagagggcaggcaagcaggatgatggtgggctctgggcttagacaccagcccacatccctggggacccccaggccaggggtgagccctgtcccgagcccaaattcctgcgtgatttttctttttttttttttgagacagagtttcactcttgttgaccagcctggagtgcagtggtgccatctcagctcatcacaacctctgcctccaaggtttaagcgattctcctgtctcagcctccctgagtagctgggattacaggcaggctccaccacacccagttaatttggtgtttttagtagagacggggtttcaccatgttggtcaggctggtctcaaactccagacctcaggtgatctgcccacctcagcctcccaaagtgctgggattacaggcatgagccaccatgcccggcccctgcatgctttctaaccgagtacaccccgtctacaatcagggacctgagtcaccacacactcagccccacaggacctcaaggttaaaggagaggaactgagaagcgggaagggggcgggtctcctgtacagcctgaggcaggggagatgggcgcagggatacgaggttctccacgttctccatccatcgctcccgcaagctgggaaggagtccagggcagagcctgggcctggggtcggggaggtctcccgaaatgtccacaccccttccccaccacccacaccctcgcccacgaggcctgagcctctggccgcaccaagccatccacgggcctgtagtaggcagccatggtgaagatgatcatgtacaggcagtagaccaggaagttgaagtagaagatgcgcttgacgaatctgtcccacttgtcctgcaggagtcggttcagcggctccaccaagagcatgtcgtggcgattctagggggtggggagagaagtgaggttccctcctgcagcaggaactcctcgcacgcccacaccagcccgtggtgcccctcacagccatgtggcccgcacagtcctcagcccacggagcaggtgagatgggaggtctgagccagccggcagccatagcctggggctggtcccagcactgccgcggctcacggagggacctgccctcttggcctcagtgtccccagaggtgcagtgaatggggtgaaactggacaagctcttaagtgctcacttaatggcccaccgcactgcccgttgtgtctaataactccctcccgagagcccacagtaatgggaagtagttggcttaggcagagcctgggcatgaggggctcagggcaggcaggaaagagcctctgggtcctcacttctcacgtttccagccctgggtcaggcagggcggcagggaggcagggaactaggaggcccttcctgccccaggagggcccagtgcctcatgccatcattacaagtatgctttggggcaaatgtctcatatccagagactttgataaagttcaaataggccgggtgtagtggctcacgcctgtaatcccagcactctgggaggccgaggcaggtggatcacttgaagtctggagttcaagaccagcttggccaacgtggtgaaactccttctctacaaaaatacaaaaattagccaggcatggtggtgggtgcctgtaatcccagctacttgggaggctgaggtgggagaactgcttgaaccccaggaagcagaagttgcagtgagctgagatcacgccattgcactccaacctgggtgacagagcaagactctgtctcaaaatataaaataaaataaaataaaaataagttcaagtatccctgagactgatgagccaaaatcagatcatcccagcctccctcaggccatcgagtccaacccccaccccaaacttaagctccctcaaagaggttcctgatcagtgtcttcttgaatgcctttgggaatgggaaactccttactgcctcaagaggcctatggagactcactgcctgtagggaatacctcttctttggtcttctctactttccactagtggtcctggctctgccctagggtccccaggacaagtccacactccttgtccctgagagcctttagagacatgaagatgtcagtggtggtcccagagcctctcccccaggtcaaatactgcagtccttgttgaggccacctcctatctggacctctcctctgggaacacttgtatccagcactctgagttggaggcccaggttcagcatggcagcccaggggaggcagagcagaccaggcctttcccagccccggactctgctcctgtaaacgcaacctctgacctgtgagatgtcgtggaagcccctcactgctgatggcacagactctagcccccaagtctgccttaggagctcagagcatcaccttagaaagaagggacagataaggtggcctttccaaacagcgtggcaggatggattactcactacgtaacactaagacattcatttggagccaaaatatttaagtaagatgcctacttcacacctacacaaaaataagttcttggcctggcgcagtggttcacacctgtgatcccagcactttgggaagccaaggagggcggatcacctgaggtcaagagttcgagaccaccctgaccaacatggagaaatcctgtctctattaaatacaaaaaattagcagggcctggtggcgcatgcctgtaatcccagctacttcggattcgaggagaatcgcttgaacccgggagatagaggttgcagtgagccgggatggcaccatttcactccagcctgggtaacaagagcaaaacttcgtctcaaaaaaaaaaagaaaaatctacacgccctgccatcaagtgaaaaaaaaaaaaggttgttgtacattgtgtatagtctgatctcatttatgtaaacaaaatgaaactgtgcatttttaaatagtataaaaggagggtccttttgtccatgtccctctgaaacgtttctgtttttatgggatgataatcacgtatggttgctatgcttagggaaaattcagtgggcatgagtggggaacgtgaggctgcagggcctgggcccgggcgcagcaggctttccctcctgagaagccagctggagctggaccaggggctgggattggggcttgggtgcagaggccctgaggccctccctggctgtgccccagccactcacaggggtctcgctgctgctgtaggcgatcacctccagcaccgagttcttctcgcaggtgtcgatgcaggacaggtcgtacagcgaggagtgcacgggcccgtaggcccactcggtgaacttcctggacaggtgcctgcactcgggctcctggatctcccgctggagaatataggccaagacctgcccccggggagcaagagcccgtcagaggccagccccaggctcagcctcagacagtacctcaacaaccagctctgcttcccagcccagctggtggccccacctaagccccaggcgagtccccacccactcctgaccaccactgagatcaaccagccggccgggcacgggtggctcatgcctgtaatcccagcactttgggaggctgaggcgggtggatcacctgaggtcaggattttgagaccagcctggccaacatggcaaaatcctgtttttactgaaaatacaaaaaaaaaattagccgggcatggtggcgtgttcctgtaatcccggctacttgagaggccgagacaggagaatcacttgaacctgataggcagaggttgcagtgagccgagattgtgccactgctctccagcctgggcaacaagagcgaaacctcatctaaaaaaaaaaaaaaaaacaaaacacacaaacgtcaaccagccagctgcctcagatactacctgcaccatatcaggcccacaatcccctcacggcgaggccccagctctaccatctcaccatgaaggacagcggtggtccattctcgataacctcaagccagaaagaaagaaagagaatgcaagaaatgagagccagatggggtggctcatgcctgtaatcccagctacttgggaggctgaggtggaaggatcacttgaggccaagagctggaggcctgtcaccaggagccaccagctggagctgggagctggagccatcagccttgttacctaaagctcctgcctgccatgctcctgcctgccatggaaaaacaccaacagcttttttctttttcctttttttttttttttgagacagagtcttgctctgtcacacaggctagagtgcggtggcaaaatcttggctcactgccacctccgcctcccaagttcaagtgatgtttgtgcctcagcctcctgagtagctggaattgtaggcacctgccaccatgcctggctaatttttgtatatttagtagaggtttcaccaggttggtcaggctggtctcgaactcctaacctcaggtgatccacccacgtcggcctcccaaaatgctgggattacaagagtgagtcaccgtgcccagcccaacagctattcttctgttccaccctaggcagtccctcctccattgcccagcaccctaccccaccccatgtcttgttgctgatactcagagctggaaattcaaaatggcacgttggccattgcagggttctgccctgtggctcccaatttctcagacttattctaacagccctacaggctggtatgacagaatcagagtcccgcacacacagatagcgacgccaggctcccgcagtgagtcaggcagtcctctcccatgccatcagccccgcaccgcaccagcctgagccgaagccccctcttaccccgatcttcccggtcccagctgccagagccagcggcgtcattcccttcttgttggtgagctcctccagcttcagcgtcgggtgcagtttggcccccagcatcagaatctcattgtacatgctcgtcacaaacttcgtgttgtcggccgtgttgtcggccacctccaccagggcgtgcagcaccgtgttgcccaccgagtccctggcgctgatgtcggccgtctgccaggagttctgcagcaggaacttcacgatgcccagctggttggtgcacgcggccagggacaggggcagttcacctgcatgaacacagggcccaggtgggcctcaggagtgagatccagctggcccctgaaccaccggcctccaaactccctctgtctctgcccaaacctccccttagcaaaagccaaaaagatcagggtctgccacactgtctccctaccgaagtagaatccaggccgccctttggttttcttaaagaagtccccatgggccgcagcctggacgtctgctccgttctccaccaggagggtcaccagggccatgttgcgtctctcgatggcgatgtgcagtgctgtctggcctacagaggacgcgcacggttggcttcgtggtcacggtcctgtggggctgccgggacaggtgctggggaagggctctgggcaggcagcagctgctgcaggaggaactgggcagaaagtgcctggaggacccccccactgcaggaggccaggccagggtcccccaaggggtcccagcaaggtcctgagacaggagacccctgggaacaggaaataacgggttggaagccagaggagtcaaaattgccccgggggcaaggaacagcagcagagagaaaggccagaggctgtgacttccagggacagggaccatccagtcagcagggggaggcagggacttctcagggtcaagagaggagacatcagatcggggaggcagagacccccaggaccaggagaaatcaagccagcagatgggagaggcagggaccccctaggattaggagccaccaacgcagtggctgggacagggagtaaggatcccagagaagcaaggaggcccagggacaaccatgcccccctgcttcccggtgctgcgggctgagccatgcccggccccgccgccctcctcacccttgtagtagctgtccgtgtagctggcgttgacaagctccttcaggctgtccgtttgccgcgcgatctccaggagcagggggatggtggtgttctgtccgtcgtgcaggttgagcatggctttcagcagacaggtcttccctgtctcagggtctgaaagacataagggagggtcagggcaggccagggctggggccctccccgagcccagcgctggggccacctttgaactcgttgtctgtgaggtgcttcttgctcttctgcaggaagagcagcaggctctccagatcctggcagttattctgagcaacggcttcaaagatactcctgcgatcatagagcctgagggtcttctcggtgctggcggcgacagagtcctgggacagcagcctgtgggccagaaaacacgctcgtctcataccctggcctcccctcggccctgaggccttcggagcttgtcaagggaacacgactaaatcccaaggcaaaccaaaaaggggaaaaatgatataaaagctgcccctcagtctaggtgactgtccagaaaagcaatgtaacagggacagtggagggcatgtgtccccattctgtccccaccctgtctatagacaccatctagaaagtcaccctcctactcccagaccactggcttctctgcctgctcgggagctcgggaggcaggagcctggtggggacggagggaggtggaggcaggggtgtagacagcccctctaagggaaaaggtggcctcacactccccagaagtcagccagcctgtggccctccctgccctgccttgcagctcactggagctgtgctgtgctctccaaaagcctcctgcccttgagcttttagacttcaagtccaagtgtctgtggctggtaggcattgcgggcgtggacacctagacccagcacagacaccagcccccgtgactgcacatcccacgaggtcacatgaggaaggacgctggaccagaccacccctaaggctctccagccccctggctttgtgacatttagcccagaagccagaccaccctgtggcatctccatggccagctgggctcccagcagggaggggggctccagacgcggacttacctggcaccggtggggccgtctcctggcctctggatggtgataacagggctgactgtgatggtcgggcaggagtccagctcaccttcctcgtgagggcaatccaccgggaaagcctcctccgagtcacccttcccaaagagccgggtgcggctcttggccgtggagagctggggcttggctggaggtggcctggagttagggtctccatccagggggtctgggcaggtgtccttttggagtgggtccgcagctgcccccaagtctgtgctgctccatttcttcatccttgctggatcctctgtggcccagtgtgcaacctgcagcagccaccacgccggggttgactcccaaagtaaggactgcttgtccttagaccccacctgccctccttgccaagggccctgtgaagcagggtaccccaaaactccaacttgctgctgcccccagccccctagaactgaagtgtttccaggactgaacctctcaccccagaggcctcagaggtgagcaggcctagcagggcccaggcagtcctgcggccactgacgtcggcctgggagggtggacaggcccccggctcagagccatctgtggttctgggttagacccatccctcctcgtctctgggcctcaggtgcctcctctgcagggtgaggttgataaccaccgcgctgcctccctccccacacagaacaaggaaaacggccggggtggctgtcgtgggctgaattcagggaggatctcggtgatgaggatggctcagtccagaagagccaagcagactgtgtccctggaatagggtgagcggcagagactggcccacccacacccacaccgcactgcggggccctgctgtgcaacgggtccacacatcatcagccaggtgcccggcctgcctttgctcttcaacctcgctgccacagccactgagcttatacgagattttggattttgtgctttttgtcatttttatgaatcaacatctgtcaagcatcctggccttgaatgtttaggcgtgtgtgtgtgtgtgtgtgtgtgtgtgtgtgtgtgtgtgtgtgtgtgtgtgtgtgtctgtgtgtctcactctgtcgcccagactagagtgcaatggggcaatctctgctcactgcaacctccacctcccaggttcaagcgattctcctccctcagcctcccaagtagctgggattacaggcgcccgccaccatgcgtggctaatgtttgtatttttagtagagacagggaacgtttaggctttaagtgatttggagctggttggtcttctaggcctaaacacctagagatcagctggccgctggcagcagcatgtgtagttggacacatgagctgatgctattttccactcccatcctgccccatccccatgcttcccctccctctggctgggcatccccactccctggcacccaggggtggcccatacatccctcccatagcctctattcccatcgggtctccacctaagggctttttcctctgtctacccttgcacaagtcctatcaccactcagatgctacttcccctcaggatccagcactgatgccgcctcctccatgaagcccccagatccctgccctgctcatgctccccgctgtcctccacacagtggcccagcccactgaccgcctgtcccacacagcctaccatgtggtccagcaattgctatctgtcactgatttatctctcccgcaccctgtgacctcctcctgggcagggacctttcctggtccatctccttatgaagaagctgtactggcctgggcgcgtggctcacgcctgtaatcccagcactttgggaggccaaggcaggtggatcacctgaggtcaggagttcgagaccagcctggccaacatggtgaaatcccatctctactaaaaaaaatacaaaaattagccgggcgtggtgtcgggcgcctgtaatcccagctactcgggaggctgaggcaggagaatcgcttgaacccaggatgtagaggttacagtgagctgagactgtgccactgcactccagcctgggcaacagagtgaaactctgtctcaaaaaaaaaaaaaaaaaaaaaaaaagaagcagcagcagcagcagcagcagcagctgcacacatggggaaataagagcaatcagacccttctaattgccatttccataggaagttagggagattactgttccagcagtggctacattccggaaaacagccgcagaagaaatgagaggcttctcaagtcctgcattttctttttttttttttttgaaatatataatcaggcaatctcccaagccagaatggctcagagagactcccaagtcctacattttcaagttaaaattcaggcagtgaaactccagagcacacaactgggccatggctgtaaaccagctacgttctgaatctcagatccatgaaaacacagaggcagcctcaccactccgcaggctgtgaacaggacggacggctggctactggccatctccctgcctgcctgttgatccactttcaacaggcctgagtctttctctgactcacccatcaggtggaccccctgcagcaggagtgttcccggccacagaaagccgattccctcatctcatcactcaatacctatctactgagtcctcctcctcagagtccagccctgcgctgggggcacagagaggagtcagctccccgctgagacagaaaccaggtactggctgggcggagggactgcaggagggggcagggtgctgaagaggggtccatggcagttggtgatggatgagctgagcctgggaagggaacagaggtgggctagggtctggagacagacagggaagcctagagcagctgaagaacgggaagtcagtgggacaggaagacaggaggccgggttagaaccagatggccgtcagccttaactccaaggaattgaaagccaacatggttgcatggatgatgctttggaagcctggggggccgggtgctagtcttccctttctgaagataacaccccgtcaaggaccgttcacagtgcggacagccctggcagcacttaaaaggcaccagaagcgaatgagaagcagaatcgttgatgcgtctgagcacgtgcacaaagcagacacggttctcaggactcgcattccttcacccacttcattcccacaacatccctaagagggaaatacttcaccgatgaggagaccgaggcacagagcagttatggcacgtccccgaggtcacacagtcagagatggaacccggacttgaccccaggcaggctggctccagagcatctccagtgctccaccacgatgctggaggtctggggctctttctcagcagttcaactcagacccagactccacagcagggcctgggggccaatcagaataggccctctcacccaaggggctaggcataagacctgaacctgaagcacctctcgctcaaacaagcagctcaggaaccccaaaatgcagtgtgaataagacccaggtcatacccatgcctggctgtcccagggatgtctatggtctccaagaataagctaagaataagaataggggctgctcgttaggcagcccagcaagagagcacctgttagccggagcctcccatgaacctttcggcaatgttctttgtcagcggcgttgccttttcctctgacgggtcccagtccaaccaaacccagccaacaggaagcagccgggattgtgctatcattcagtcagtcgacaaacgctgaatctatactgcacactctgcacctgattccctactggaaaccaagcttcttccagggaacggggtgggacaggaactgaggggtcatgtgccctgggctgggccggggaacagggtcaggacagccctccactgccaggcctggagtgtaccctgcacctaagcccgtggtgatgcacctgtcaccgcaaaacattctacagtgatcaggggaacttctaccgtgatttaggcaaacgagtgttggctgtgtgatggagatggtgattctggtttacacaagactcacaaactcatcaatctggactaaaggacaatcctaaaagaatcgattctgcccacagagacgtggtatgatctgagtctttctcaactccaaagccagaacagatactgcctaccctctgggggaaggatcccttctctccccaatgcaagtgagacaacatggggtgtggctcccctgctcctctctctgcccaaagcatccatccatccatccatccatccaagttcttgggagcacctcccgctcgccactggggactttctggaagctgggagaacgctggcccaggacccagccagattattctcagtagtcccttctgtcaaagggaggcagtaggctgcgggcttcccaacccaggggtgaagaacaaagagataggacagcagcacaaggacccagtgtgcctgcttcccagccctgcgctcgtccactccacagagagggcgacacgctgaaaacctccggccacacaccagcaatctcagcagcagctgcagcctcctcccccgaggacggctgatgcaggagcaacaagaacaaaccccagtaacaacaacctccactctcacctcccaggtgcttccaaggagccaggctgagggcaccacaagttcgcttcagcctcacgaccacctttgaggcagccactcttactaccccccgttttcagataaggtaactggggcacagagaggtgagtggacctgcccacagtcgcacagctgggaagtgacagggcccggcttttggccactcactatgccatcttaaaagctaatgtctgcattggccatcagacaaagaaagggactcaccagctagacgcaggcacaccccaggcccacgggtgcttgtgagcttgaaggcggttgctactcgaagggagagctgggctcgtgtgggagaagagtggtctccccgcctccgtggggtcccgggcccggccctggcagcagctgccctgcactagcaggagtcgctgtggacgcccttcggcactcaaggaaaaaacgcttccagcgatgcaagcagctgcctttgctgcggctctgattcccagaggatcccaaagcttttcccatcatttttgccctttttcagaaaccacttagctgctgcccctcctccagccatgccagggctgcagagcacttaccagagccagccagagctgcaacctcagctctcaggaaaggagggcgctgctcggcctctcaaacctgtggctcctgcccccggaggtctgggaaacggctccacaaatgacattcacaaccagcgacgtcaaaactagcgtcctgtaactgttccgttttcaaaataaagagggaatggagggtcgtgctgcccgccacacagtactggcctggcattagggacttgttttgagagtccgagcaaccttgaactagtccctaactctcttaggcctctcgttcctgggtccccaaacctggagtaggggttggcgtcgagggggtcttctgggtcagccaggtcccagcctttcttctcaactgggggttcctcagggaaccacaaaacacagataactatcagtgtcatttcctttttttttttttttttttgagacagagtcttactctgtcgtccaggctggagtgcaatggcgcgatctcagctcactgcaacctccacctcccaggtttaagcgattctcctgcctcagcctcccgaatagctgcaattgcaggcacctgccattgcgcccagctaattgttgtatttttagtagagtcagggtttcgccatgttggccaggccggtcttgaactcctgacctcgtcatccacctgcctcggcctcccaaagtgctgggattccaggcgtgagccactgcgcccggccacaagtgtctattttctctcttcacttcataccaccctaaatgcacaggagagaagacccacaagagagaaacgcacaggagagagtcacatacagcagataactagaacaataggtttcattctctcccagaccctggctgagaaaaacagtgaggtctaggtatgcatccaggctgcggcccaaatgccctgcaaaaaccatcctagcagctgcctgcgggacgccaacaagccgtagggcaggtccagcctggaataagcagccactgccagggaggccctcgtaaccctgcctggggtcgcttgaaagctctgacccctgagtcaaggcattgaagtgtggccaccccatcaattccgcacagcagttgacaaagagctttcccaaacccgctctcgcaggccgtacagcaaccccgggcagtgggagggcagagactgtcatacccattttacaggtgagaaatgtgtgacgctgggcaattagacaaccgataattagataattgcccaggccgcacgttggtctaggcataaaagccaggcccatcccaccacgccacaccccaccatacccctcgcttagtcactttttttttttttttttttttagatggtgtctcgctctgtctcccaggctggaatgcaatggcgcaatctcggctcactgcaacctctgcctcccaggttcaagcaattctccggccttagcctcccaagtagctgggattacaggcacgtgccaccacgcctggctaatttttgtgttttcagtagaggctgggtttcaccatgttggtcaggcctggtctcaaactcctgacctcaagtgatccacctgcctcggcctcccaaagtgctgggatcataggcgtgagccaccgcgcctggccgcttagacacctgtttatgctatgtgtgtcatgttagcttcaattaatatgaacgttagaattcattcttgtttataaattgtggcaaaaggccgggcgcggtggctcatgcctgtaaccccagcactttgggaggccgaggcaggtggatcacctgaggtcaggagtttgagaccaggcctgaccaacatggtgaaaccccatctctactaaaaatacagaattagctgggcgtggttgtgggcacctgtagtcccagctattcgggagactgaggcaggagaatcacttgaacccgggaggtggaggttgcagtgaaccaagatcacaccattgcactccagcctcggcaacaagagcgaaactctgtctcaaaatatatatttatatattataataagttgtggcaaaatatatataacaaaatttaccgtattaaccatgtttaacagtacagttcagtggcactcagtgcattcacactgttgtacaaccatcagcatcatccatgcacagaactttttcatcatcccaaactgaaaccctgcacccattaaacactaactccccttcccgaccccaaccccctaacgaccaccattcaacttcctgtctttatgaatttaactattctaggagtcctctggtcaggaatcatacagtatttgtctctttgctttttgtgactggcttctttcacttagcataatttcctcaaggttcatccatgtagtagcctgtaagagaatttcctttttttcttttctttttttttttttcgagatgaagtctcactctgtcccccaggctacagtgcaatggcgtgatctcagctcactgcaacctccacctccctggttcaatcaattcttctgcctcagcctcccgagtagttgggattacgggtgcatgccaccacacccaactaatttttagtagaaatggggtttcaccatgttggccaggcgggtctcgatctcctgaccttgtgattcacctgcctcagcctcccaaagtgttgggattacaggcatgagccatcacacccagccctccttcctttttaaggctgagtaatattccactggggcgtgggatggatggaccacattttgctcatccattcaccagctgatgaacacttggcttgcttccacctttggccatagtgactagtgctgctatgaacataggcgtgcaaatatctggtcctgtccctgctttccattcttttgggcacatatagacccagaagtgggatctgtcatatataaaagactcagcagtggtgacctctcaactttctagtcctctgggatcatttccttctaacaatgtgggatagagcaatggctgggaaaggggatggtcatgcttcttctccagaaccattgccttagcctccaaagtgatttctgcctccaataaagacagcacggagccgggcacggtggctcaagcctgtaatcctagcactttgggaggcagaagtgggcggactgtctgaggtcaggagttcaagaccagcctagccaacatagtggaaccttgtctctactaaaaatacaaaaaattagctgggcgtggtggtgcacgcctgtagtcccagctactctggaggctgaggcacgagaatcacttgaacctgggaggcagaggttgcagtgagctgagatcacaccactgtactccagcccgggctacagagcgagactccatttaaaaaaaacaaaacgaaacaaaacaaaagacagcaccatttccagtgaacacagcacacatcactaaatgtgtcctgtcctctttgttaacagagcccttggtgctaacagtatcaccggagtctacagggcacagtgcctgctcagaggcctgcaggggaagtcccggccctcctcctgccctggccactcctgccgggactccctggctgctctcctcttcttgccgttccccacacctgggggtccaaggaccccgtccgcagccttatcttctccagctccaccactgtccttggagaccttcgcctggcccctcccaaggacctctctgatgtgtccaagtcagcggctgcttcatccagagtccacccagccctcttccctgagctccatccctgcctccctgaatctgcaggtgaagcccacaagccccctccccccagcataacccacaatgggctcctgttccctccacattcactcccctcccgctccctgcagcagtccctgcctggaaaggcatcaacttccttctggccaccaaacccggtgccctttgtgacctccagcctctccttctcggccctccctgggctgtttctgtggcttccgtccatccctcctctacctgggagccccttcttctcacctgaatgaccagaagtgcctcctttccctggtccaacctcccacaacccctcacctccagatcaacagtcctggaagctcatcctgatcaggcccccttgcctctcaggggtccccactgctgagcaacgccccacccccgcaccctgagcccacagacccagtctcctctcccaccgaaacccaccttctgtcacctgggcacaccccttcccagccacactaaacgtgctgactccaccctttcccccaccctcctccatcccagtaccccacttaacccatcttcaagtgcgaggtgagccctagggatgctcaaatcccaccttctcccaaaggccccagcataaagagctcatttctcaccttttttttttaaagaggtggtatcttgcattgtcacccaatgcaagggactcacaatcatagctcactgcagcctccacctcctggactcaaaggatcctcctgcctcaccctcccaagtaactgggactacaggtgtgcaccaccacgctcggatttttttttttttttggtagcaacagagtctcgccatcttgccagactggtctcaaactcctgagttcacgtgatcccccacctcagtctcccaatatgctgggattacagacatgagctaccacgcccaactccagaagtgctcacttctaaactcctacaggaacttcaaccaatgcgcttcctatggcaacgggcacagtactcatggccacaatgatgacaacagtaatggctgtgaatatgtgttgagtgcgtacaacgtcctgggtgttggcatgagcactttatatgcactatctcatcagacctcagtaagagttcatgaggtgagtacaattttgtccccgttttactgataaggaaagaagcacagacaggctacacacctgccgaaggacagtgacagctctactagtctcgtctggagctttctaaatcttgtatagacatgtaacgtcatgattttcttgtgtcttgctttgcagatttaagcagctccagggtgagatacatacggctctcgtgccctcccctctctgaacctagcttgcaccttgctcaaagcagcactcaggaaacgtttgttggcgtggtttttggctttatctgaacagcaccttcacggagtgattccactaaaactctcgacatggtggcggggacaagacctcagggctggccatcactgccatcagtgtggttttctgggtcatcatttgaaacaggatgttcttgcatttatgtaatgatgtacccattaaaactccttgtgagtagaaaagttttaatgacttctgggagggagggtggttttctaagttcaggtttgatgggagcgagaggcagctcaggaaagcgtctgcggacgcgccagccagcggctgggccaaatctggaatggcagatgctaaacaccgccaccgtcgctaatggtgacagttttctcttagtgttaccactagggggcacattgacttaagctgagttcttgacattaagctgagctcttgacactggccatcggagacaaatttcttttcttcactcacctgggttcctctcaagattcgagccccagccggcctcagtggctcacgcccgtaatcccagcactttgggaggccgaggcgggtggatcgcctgaggtcgggagttcgagaccagcctggccaacatggagaaaccccgtctctactaaaaatacaaaattagccaggcgtggtggtgcatgcctgtaatcccagctactcgggaggctgaggcaggagaatcacttgaacccaggaggtggaggttgcatgagctgagatcacgccattgcactccagcctgggcaacaagagcaaaactccatctcaaaaaattaaaattaaaattaaaaaaaaaaagaaaaataccctccttcctgcatttcgtctctgtgttcctgtcaccgggtgcccaagagtctaaaagaccagcttccgtggagggcagcggtctgcgagccggtcagcaccctccagaagtggctagagcttgaagtctgagctggggaggggtcagacacccagtcagcacagaacgctggagccccgctctgcagagctgtgttccagggcagggactgggaacaagagggacgagggccaatggagggtcagcaggtgggtagaacctggaccttggatggaagaggcccgcgtgtgctagatgccggctgtatggactccggctggtagctgaacctctgggtctacttcttcctccacaaaattacagccaagaacacctgccctacctgctttacgaggcttttctgggattagtcaggatagtgggtgtgaatgggctctgagcctggtaaagctctaggcaggcatgagagatgactgctctcatcttcattatttcagcctgaggaccacatctgctgactgctgagctgtatccggccattagctcgaagttatgactaattgttttttaatgaaaaaaacaaggtttgcttaatgtttgatgagtcacgcaagtgagcatctctgtatcaggactctcccactttcaaagacttggcctgtccatctacctgtggctgaggggagaggccaggtgagaccctctctcctgagggcccaccatgtgctatacaaatcccctagcagagcagtagggtcaacagggtggtctctgcgctcaagaagcccacgatggacaggaaaggaagatgtgcacaggctctctcttgacactaggcagggcagggcaccctgtaacaggcacaggccaggggctctggggccaacagaccatgccaacaacaaatgttgagccgggtcttggcctcccctgcagttgtaatcagatggcgtatgtgtcaccagggaggccctttgcagagggcagatgccatttgggctgggccttggacaaggagaaggattctgccccacaaggaggacattccaaacatgggccttggcatgagctaaggtgcaggaggacagggctgaggacacctaggcacctgctctcaaagagctttcagtccacttcagaagaagagaaaaataggccaggcgtggtggctcatgcctgtaatcccagcactttgggaggctgaggcgggcggatcacctgaggtcaggagtttgagaccagcctggccaacatggtgaaaccccgtctctattaaaaatacaaaaattagctgggtgtggtggcaggcacctgtaatcccagctactcaggaggctgaggcaggagaactgcttaaacccaggaggcggaggttgcagtgagccaagatcgcaccactgcactctagcctgggcaacagaggaagactctcaaaaagtctcaaaaaaaaaaaaagaaaaagaaaaagaaaaaaagaagaagaagagaaaagtagagaacatgaaagccacatacacatgatgtggacggggtcaaggcccagaggcaggcagtgtgtggcgggaggaaaagcagcggctggtgggctggagtcccctaccctgccctgaactgggtctggcccaccatctctccaggctgttttacagcctcctgtctcccagaacacccttcctccaatccagcgtccacactgtcagctacactcccaaggccccagtcctccaaaccccactgtctacaggagacagtccaatcccctcaggcgggcatgcaagacccttcacagtctgcccaacacgtccagccacaactcctataaacatccttccattcacactatgaccaagttacaccaatttgtcacactctggacatgacgatcactttaatgtaaacacatttacctagcctgaccccactgcctagttgctaaagagagtgggttcgctctggggtttgaatcctagcactgtgatctcaggtaagttacttaacttttttgtttatctatctctccatgtgtgaaatggggataacactacccaccttctagattaaatgaggcctggcatggtgcctcatgcctataatcccagcactttccgaggccgaggtgggtggatcacttgaggccagaagttcaagaccagcctaggcaacatggcaaaaccccgtctctactaaaagtacaaaaaattagccaggtgaggtggtgtacacctgtaatcccagctactcgcgaggctgaggcatgagaattgctggaacccgggaggctgaggttgtagtaagctgagatcgcaccactgcactccagcctgggtaacagagtgagactccatttaaaaaaaaaaaaagattcaatgaattcaaacaagtagagtttagatcagatcccagtacacagcaggtactcaaaaagaaatgttaactgtcgttagtaaccatggatggaaacccttggaggtttagctcaatgtgacttgtgtaaagaatgaatttctcctccctctgggcatagaggtgctgtcattgtctgtgtctttttcttttcctagggtctgtttatgtaaccaactgttggtatttttccattgcctcgtgatggaaattcaacggggggcagtctctgagagaacacccagctactactgggcgctcagaaaatgtggctgcctgggtctgtgctgggtgcatgggagacgtcccaggtgcaggctactgaggctgctctgctgtggtgacaacccccaaatctcagtggcttcaaacatcaaaggtttattatttatttatttatttatttattttaaagacagaatctcgctctgtctcccagactggagtacagtggcatgatctcagctcactgcaacctccgccttccaggctcaagcgattctcctgcctcagcctcccaagtagctgagattacaggtgccgaccaccatgcccggctaatttttttgtatttttagtagagacggggtttcaccatgttggccaggccggtctcggaactcctgacctcaagtgatccgccctcctcggcctcccgaagtgctgggtttacaggtgtgaggcactgcaccaaagggcgcttacttctctgtcccactgcacgtccctcgctggttggtgagaactctacaccacactgtcctcactcagggacccaggctgacagagctaccactctctggggcactgccagtcacttgtggcaaagggaagggtgtgtggcaagtagctcactggctcctaaagacctctgcccaggagtgacaggcattccctgtgcacgtcccactggccgaagcggatcggggggaaggtgcagccctgccgtgggctcatagcatcgggatactgacggccagcaaaggagccccgctcaccacttcttcagaagcatgccggcctcaaaccacttactggcacctcctgggaaggagggtgggttgtgcacgtggttgtgacttcaggcagctgcactcatcccccacctagacggaggctccaggcctcaggcaacggaagcagcaggagcagccctgtttattgacaaactgggaccctccaaggctcagtcctcagaggcagagtgaatgcatagtctggaaagaggacagagagttccggggccacaccaggcacaaggctgggctgcctgagcttgctggatgtccatcccgttcctaaccttacatttgcagaccccatccactgcatgctgggcaggcgagacaggctgccactctgagattagacggcctggctcctcccaaaagacaaaggacgctggtaaactcagcctactcttctctctcatgcagccttcctcagggctgcaatgacagcatcttaaactcatttggctgaaagaaaaattacagtagcaggccaggcatggtggctaacgcctgtaatcccagcactttgggaggctgaggcaggtggatcacctgaggtcaggagttcaagaccaggccaacatggtgaaaccccatctctactaaaaatacaaaaattagccaggtgtggtagcacatgcctgtaatctcagctactcgggaggctgaggtacaagaattgcttgaacccgggaggtggaggttgcagtgggctgagatcgcaccactgcactccagcctgggcgacagagggagactctgcctaaaagaaaaaaaaaatacagtagccccctgtcatccacaggagatatgtcccaagaccctgcatagatgcctgaaaccaaggctagtattggatcctgcatatgccatgttttttctacacatacatatctgtaatataatttaatttacaaattaggcacagtaagagattaacaacaacaataaagtagaacaattttttttttttttttgaggcagagtctcgctctgtcacccaggctagagtgcagtggtgcgatctcagctcactgcaacctctgcttccagagctcaagcgattctcctgcctcagcctcctaagtagctgggattacaggcgcgtgccatcatgcccagctaacttttgtatttctagtagagacgagttttcaccacgttggccaggttggtttcaaactcctgatgtcaggtgatccacccgcctcggcctcccaaagtgctgggattacaggtgtgagcccccacacccagccaaagtagaacggttttaacaatacactctaataaaagttatcacacactgtgaccatacttttgcagtttgaggtgtgacagcaaaactggcatgaggctggggtcagtggctcccgcctgcaatcctagtactttgggaggccaaggtaagtggatcacctgaggtcaggagttcgagaccagcctggccaacatgatgaaactccatctctactaaaactaaattagccaggcgtggtggcaggagcctgtaatctcagctactcagaagggtgaggcaagagaatcgcttgaacccgggaggcagaggttgcagtgagccaagattgcaccactgtactccagcctgggtgacacagtgagactatgtctcaaaaaaaaaaaaaaaaaggcaaaaaaaactagcacgaatttctttttctttagaatttcacagatagaagattcagcatatgactgttttcttcccatcttttcacttaaaggaagcaccttacggtttctctttggcatatccgaacagccagcatcactaccagcatcactactctggtgctttggggccctaatgaagtaaaaaaagactgacctgaacagaagcactgtgataccaggacgggcgatctgacgactaagtgactgaccggcggggagcatctacggcctggacgtggggaacacagggacggtttgcatcccagatggcacggcagagactctccatcacactgctcagaacaatgcacaagggaaaacttgggaactgtttgaagaattttccatttaatattgtcagaccgtggttgaccgcagataactgaacccatggaaagtgacaccgtggataaggggggactactgtggacagctttcctgggtgattgggagacgtttttctggtagaacaccagggcaaggcttttctgaggatgatctacgaattctccccagagcacttcaacctcccaaaccaagctctgcggctgtgccattgcacagtcttcccacagcagagaggtgtgttttatttaaggcacaagactctggaagaatgggctttgtatttatttatgagacagagtcttgctctgtcacccaggctggagtgcaatggcgcgatctcagctcactgcaacctctgcctcccgagttcaagtgattttcctgcctcagcctcctgagtagctgggattacaggcatgcgccaccacgcccggcttgtatttttagtagagacggggtatccccatgttggtcaggctggtcttgaactcctgacctcaggtgattcacccacttgggcttcccaaagtgctgggattacaggcgggagccaacatgcccggccaagaatgggctttagtatctgacatttggccagagtgatcaggcatttgctctcatcttagagcttccagataatcacataatttgtaaaatgacatttataaagagacaatatgtttcatacctgtcatggatactgagagagagagagagagagagagagagaatacgactgcttcccaaactcgtggttgccagcgtgactctgggccaggcctgcctgagcctgggctcctttgggagtctagaagtagatgcggcaatggtggccccctcctggaagccaccccacagccatccctaccaatcacaagaaggcttacaacgctctgggatccctacagggatgccaactcaaatggatgtttctgctgagccaggagcacacactgggccagcaaagcccacgccaagcgaaaggagagcctgggcctatgggatacagagttctctttgaataaactacctgccccatctggcaggagtctgcctggctgcatcccttcccatgagggcttctggaatgtgcaggggcaaaaacactgctgcacagacatgctcctggcaaggggtcctgctggtgccttgtcaggttctggagtggtgtgagctgcacagcatcggtcccccttgctgctcatgccatccgcctctccttctcgcaacctgccttccaggcagttgtgctgtgaagacctgggcggcctgggtgcagcaagctctcctgaggctgagtacatgcagcaagaaggccggcacacagccccgcatcgtcttctgagcctgcctgctgcatcgcgcttgggtcaatccctggcccagctaagcatctgcagccaggggaggatgagactaggaaaggggcctccggtcacatggttcagtccaggagacaagaacttttccagaagtccatacgacccgagtgtgggcttcaggtctccaaaaacgataatcacaagctgggcatggggcagttctcttttcccacttgggaccaaagccaccagactttctggtgtctgaagtacacattgatctgctctctgtctacaggtgaaccacagatgagcctgctgaccagcaggctgggctactgtgctctcatgctctctctctcccacatggacatttgtaaatagctcccaggtgggtcaatttcggaaggcactcatttgggatctggctgacggctcctggctgcattattagagtatgttctgaaggtaagttcttggccgagatgggacctcacaacaagcactgcttgaaagctgtccactgaacggtccagggaaaggatgacccacagatggtgtcaggaatgttaatcaggtaaaattcacagcagtcgtttggcgaaagagtttgctgtctaagattccttctggttgaggtgtctccggagcatgaccagagctgccccgacagctgcatccacatcctgcccaaaggacatgggcaaagggaaagccctctgcacctcctgcttcagcacgtcattcctggacagcgcactcccactgcccatcaccctctccacgccccactcctggagctgctgaatcggaagcatggagtgcaggttctgaacaatgcctcggcacagagcccgggtcacgtgccccagggagaggtcggaggaggagattctggtcactgaggccagctggtccggcaggtgcctctcccccagcactgtcggggtgatggtcaggtgggtatctctctgctgcacagctgcctgaatcatgcgtgaatacacagtggattcttcaacctccaggcctgccagagacagagaagatctgtgtaagctcatgcgtccccctcagtgcaggctgacatggcagagaattcccacagggtgggaacagcgctacttgctgcttctcctcccgctgcagctggtggttctgggctcagggactgctatagccaggctagctacactctgccctggatccccgcccgctgtctcagtgcagaccccagccagacatcagggtgaggtctcattaagtgctgccatgagccctacccctaacacaggcttcttaaccaaggggaccaaatgcatatacagactaataactatcattggctgggcgtggtggctcacgcctgtaatcccagcactttgggaggccaaggcgggcagatcacctgaggtcaggagttcaagaccagcctggccaacgtggtgaaaccctgtctctactaaaagtacaaaaattaaccgggcgtggtggcaggcacctgtaatcccagctactcaggaggctgaggcaggagaatcacttgaacctgggaggcagaggttgcagtgagcggagcttgcaccactgcactccagcctgggcaacaagagcaagactccatctaaaacaaacaaacaaacaaaactatcatcatggatgtcattggggtcgttagcagcatcagaaatcccaggatccaggaccaatcactgaatgggccaccctcgttatgtgcacagggcacctgaaatccaaggaagaaggatgagttgaccatcctacaacttgcttttcagtgtcaagccagaatcccgatcggacttttctccctgacaccacgttagctctgcgggtttttttttttttttttttttttctgaggctcgctgtgtcacccaggctggagtgcagtggcacatatcctatcggctcactataacctctgcctcccgggttccagcgattctcctgcctcagcctcccaggtagctgggattacaggcccacaccaccacacctggctaattgtggtatttttagtagagacaaggttttactacattggacaggctggtctcaagctctcgacctcaagtgatctacctgcctcagccttccaaagtactggggttacaggcatgagccaccatgccccgccagctctgcattcttaaaacaaacaaacgaaaaaaaaaaaaaggccaagcgcggtggcttacgctgtaatcccagcactttgggaggtcaagacaggcggatcacttgaagtcaggagttccagaccagcctggacaacatggtaaaaccctgtctctactaaaaatacaaaaattagccaggtatggcagtgtgtgcctgtagtcccagctacttgggatgctgaggcatgagaaacgcttgaacccagaaggcagagcttgcagtgagctgagatggtgccactgcactccagtctgggtgacagtgcgagactcagtcttaaaaaaaaaaaaaaaaagcctttggtttcgatacactttgaccttagaatcacttttgatctataacctcgcatgacctgagggaaagcaaacatcaccttgataagaagaaagttatcaacatcagggtttcttgagagcactgtgggccccatctccagactttctgatttaactggtgtgggttgcaggctgcgggctggaatttgtaaacacttgcagttgattcttatacacagccacgctggggagcccccgacctagacctagggcttctccagcctagggcttctccaacctgaacatacagatgagtcactcagggatcttttttttttttttttgagacggagtcttgctctgtcacacaggctggagtgcagtggcgcgatctcggctcactgcaacctctgcctcccaggttcaagcaattcttctgcctcagcctcccgagtagctgggactacaggtgcatgccaccactccaggctaatttttgtatttttagtagagacggtgtttcaccatattggccaggctggtctggaactcctgacttcgtgatccgcccacctcggcctcccaaagtgctgggattacaggtgtgagccaccacgcccagccagggatctttttaacacatagcttggactcagattgcctagggctgaccctaacattctgcatttgttaaaagctcccagaggaaactgtactccaggccagtagaccaggctttctgaggagacagttctagagcagtgcttattaacacttcaggcctcagaatcacctgaggaacttttataaaactcatgctcaaggcccacaccccaggtccaataaatcagcatttctgggcgtgggaccaggatgcaacgatgtttttaaactccacagtatttccagggtgtggtcagtgccaagacccaccaatctagagagtcactgaggagtcacgccatgggaatgtttaacctctgcaaatgcacaggtgcagtggtattatttcagctcactgcaacctctgcatctcgggttcaagtgactctcctgcctcagcctcccgagtagctggaattacaagcgtgtgccaccacacctggctaacttttgtatttttagtagagacagggtttcactatattggccaggctggtctcgaactcctgacctcaggtgatccgcccgcctcagcctcccaaagtgctgggattacaggcatgagccaccgcgcctggctattttattttttaaatcatgtgcttatctttctttagtaaaagttcaggaaaaaaagttttcttttttttttacagacagggtcttgctatgttgcccaagctggacttgaacaactctgagctcaagcaatcctcccgcctcggcctcctgagtagctgggattacagccacgtgccaccatgcacagcgccaaaaaaggttggaagggaaggttaaaacatactcttcctcctctctgggaaatacttgggccatgacccaagctctggggtacctgaaggaaggtgcataccagctggaggcctggaagagaggcctggcctctagcagagtgcctgcgtcctcagctcccccagtctatttagtgaggacgaatggaggcgaaagctgctatgagctgttgagttaattctaacccaaggacttaagaccacaagacactggagatgggaaaacaaagaagggaagggacttgccaaggccaaataatgactcagggacacagctgggaaccaaagtcactctcctgggttccaccccgcaccgtgcttctttaagaaatgcctacatcagggcgagcgcagtggctcacgcctgtaatcccagcacttttggaggccgaggcaggtggatcacaaggtcaggagattgagaccatcctggctaacacggtgaaaccccacctctactaaaaatacaaaaaaattagctgggtgtggtggcgggtgcctgtagtcccagctacttgggaggctgaggcaggagaatggcgtgaacctgggaggcggagattgcagtgagccgagatcgcactactgcactccagcctgggcaacagagcgagactccatctcaaaaaagaaaagaaaagaaaagaaaagaaatgcctacatcaggccaggcacagtggctcatgcctataatcccagcactttgggaggccgaggcgggtggatcacctgaggtcaggagttcaagaccagcctggccaacatggcaaaaccccatctctagtaaaaagacaaaaatttgccaggcgtggtggcgcatgcctgtaatcccagctactcggaaggctgaggcaggagaatcccttgaacctgggaggcggagtttgcagtgagccgagatcgcgccactgcactccagcctgggtgacagagcgagactccgtctcaaaaaaaaaaaaaaagaagaagaagaagaagaaaagcctgcatcgcacttcctatggccaggcttctcaggatataagtgcattgtaagtgaaatacgcaccattgtaagtcaaggagcaactgtccatggagagcagagaaaacttcataaattctaccccaaggataagagaaaggagcaggaggagaaaagagggagcagggagggcgggggaaagctggggagactgttaggaaggttcacagtcaaggttgggggaagggtgcctgacccaaagaaaagagtaggtgatggcagcttggaggacaagaagaaaagaggctgcaagctcagatcccaaaggatgggagaaatatgccaggacctggcagggtctgagacctcaatgtggacgctgaaaccgcacatgaagctccgtgaagctccgagaccctgccgggtagaaaggacaggcagagaacacagcgctgtgtgggccacaccttacctagatctgccatccactgaaccagcatgtggacgaacgtggccagcacattgcccccgttgagtgacgcggccacccccaggtaggtcctgttgaagtatgggaagtaggcgactggggccgtagggtctggagtctgtgcaggctggaatcctgaaggcatggaggctgccagctgaaccgaggtgctgatgttgagaactggggtccgaagagagcagagcttaggcctgtcgggctaactcagaggtcacaagtcacagtttggcagtgagagggggtggcctgtcgggttaactcagaggtcacaagtcacagtttggcagtgagagggggtggcctgtcaggctaactcagaggtcacaagtcacagtttggcagtgagagggggtggcctgtcgggctaactcagaggtcacaagtcacaatttggcactgagagagggtggggttttaaaaatatgtccaggatagttagaagggcaaggtgttgaagagatgttgatcaaaggaattttttttttttttttttttttgagacagagtctcgctctgtcacccaggctggagtgcaatggtgcgatcttggctcactacaacctccacctcccaggttcaagcaattctctgcctcaacctctcaagtagctgcgattacaggtacccactaccacgcctggctaatttttttatttttagtagagatggggtttcaccatcttggccaggatggtctcgaactcctgacctcatgatccacccacctcggcctcccaaagtgttcggattacaggtgtgagccaccgtgcccggccgatactcctcctttcaagaggtagaacctgattcccctccacgtgagagtgggctggacttagtgactcacttctagtgaacaaaataaagcacaagagacagtgtgtgccttcagaggctaagtcataaaaggcactgcgactcctatctcggtcacgctgtcttgtggatcacttgctctcggggaaggcaggtgccacgtcgtgagcagccctgtggagaacctcacgtgccagggaactgaggccttctaccaacagcatcaagcgtgggctcagaggcagatcctccaggctcaatcaagcctttggaagactgcagctccagagtgaatgcaacctcacgagagaccttgagccaggacatcccaccccactcagaatcctgaccctcagaaactgtccaaaataataaatgtctgttgttttaggctactatgtattagggtaatttgttacacagcaaaagaaaactatgacagggtaagacctcagaccaagggctttagtctctgaggaggtttcattcattggcagtgaatactactcttgctcatttccaaagtattctttttgttgttgcttttgtttttgcttttgtttttcagacagagttttgctctgtcacccagtctggagtgcaatggcgcgatcttcgctcatgcaacctctgcctcccaggttcaagtgactctcctgcctcagcctcccaagtagctgggattacaggcatgcgccaccacgcccagctaattttttgtatttttattagaggtggggtttcaccatgttggccaggctggtctcgaactcctgacctcgtgatccacctgcctcggcctcccaaagtgctgggattacaggtgcccgccactgtgcccagctaatttttatatttttagtagagatggggtttcaccatgttggccaggctggtctcgaactcctggcctcaagtgatctgcccacctcagcctcccaaagtgctgggattacaggtgtgagccaatgcacccggccaagtttttctttaatcagatctggtgtcgtaagtgggatctgaacccacccacctcacgatgacctctgggagcaacaagcaaacgggcataagtacccactgagccttggcactcactgcttcctgctgcacattgggaggccttctccagtaagccctcttggacatatgaactccacaacttgtgttgagttcactgagttatttgggcatttttaaatctggactgggtttggaagccatgacagaaactggaacaggtgctgaagggaagcttcaggtgtccaactgggtcagacagaaactaaattgggtttagtaaaagacctccagtagaaaaggttccaggaagacagaaaataatgggtttacttaaattcagggagtctgagactccatctcagaacatttgcttttctagataaatgagtgaatcttaccaaaaataatttagaattttggtggccacataaggaagttttaacctaaacaaacaaacaaacaattccaaacacctcagaaacaatgggatatatttttgattggcaggtaaaagtttctgacctctctttctttgtaccttcctctccctacactgaatctgctgacatttttgcctgtttacctcctaccccaaagtcaaaaaaaaattaaaaaggagaactagataactgtttataaaagtcaggctctcagattaaccagatctgctttttaagcattcttatgccttcgtcaaaatcttgagctcagagcaataatgaaagatatccctgtttggcataaaaaatgctttgtctgccctatcaaaattgttttgtcttgcttctgcaaatactttatgaaaatttcccctcttgcctctcctggcagagtgctaggagtctggtgctaccatgattcacaaatcactgcatcttcaaataaactctttgtttgtttgtttgtttttgagacagagtctcactctgttgcccaggctggagtgcactggcgcgatctcagctcacagcaacttctgcctcctggattcaagcaattctctgcctcagcctcccgagtagctgggattacaggtgcccaccaccacacctggctaattttttgtatttttagtagagatgggttttcaccatcttggccaagctggtcttgaactcctgacctcatgatccacccacctcagcctcccaaagtgcggggattacaggtgtaagccaccgcacccagccaaataaactttttaaaatttaaatgtacttcttctatccaacattcaatccttttttagctatgtgtatataccacattataaaaattcattcatggctgggcacagtggctcacgcctgtaatcccagcactttaggaggccgaggcaggtggatcacaaggtcaagagatcgagaccatcctggccaacatggtgaaaccctgtctctactaaaaatacaaaaattagctgggtgtggtggcgtgcgcctgtagtctcagctacttgggagactgaggcaggagaatcacttgaactcaggaggcggaggttgcagtgagctgagattgtgccactgcactccagcctgggtgagagaacaagactccatctcaaaaaaaaaaaaaattcattcattagttgacagacatttagatggtttatactttttggctattataagtaatgctgctgtgaacatctgtgtacaactttttgtgtggatatcatttgttttcagttctcctgggtgtatttctaggagcagaattgctggggcctgtggtaactccacgtttaacatttgaggaactaccagctgttttccaaagaggccgtacctttttacaatcccactagcatgttctcactttttttttttcaagtttaatcattttgtatataagcactgattttacaaaacatagtatataaaggcaaactaaatttacataacttaaattgttatttttttttctgcctctagagatgatgccttaagaacaactcaatttgttcacgtaaattgccttcagcctacgttgcagctaagatgtgtgtaagattttacatgtattttggaagaaatcacacagaagaagctgctttttcaataaacgtggccagcttcacatctcttttgatcagtccaccacagttacgtgaggtgagagttatctggaccttgttttatacattgaaccattccgggtgatgattcatcttctctgcttgtagggcaactcgggacataaagccaaatgcctgattaaaaatttggacggagaggccgggcacgatggctcacacctgtaatcccagcactttgggaggccaaggcaggcagatcacaaggtgaagagattgagaccatcctggccaacatggtgaaaccccgtgtctactaaaaatgcaaacattaaccagccatggtggtgtgcgcctgtagtcccatctactcgggaggacaaggcaggagaatcgcttgaaccccagaggcagagattgcagtgagccgagatcacaccactgcactccagcctgggcgacagagtgagactccatctcaaaaaaaaaaaaaaaatttggaagaagaatgatttgtagatggcatctctctctcacttaattctgaccatcctgctgctttaagattgagtatagcttggttcctctcctctgctgtctacctgtgagcacctgacaacatggccacgagccctgggctccggcctcccagcgccgccaagcgccatatcgtcccacgttctcacgtttttaaatggttgaaaaaaaattaaaagaagaatttttcatgacacatgaaaattatgtggcattcccatttcagtgtctatgaacaatgttttattggaacacagctacacccgctcatttacatatcgtctatggctgcttttgaattcctacagcacagctgagcagttacaacagagacggcatgatccgcaaagccgaaaatatttacagaaaatattttctgccctttagagtaaaagagccaatccctgccctagacacagctgcctctacctcaccatgattcccttactatgaatacagaaaatattctacacttctttttttttttttgagacagagtcttgctctgtcgcccaggccggagtgcagtggcacgatctcggctcactgcaagctctgccttccgggttcacaccattctcctgcctcagcctcccaagtagctgggactacaggcgcccatcactatgcctggctaattttttctatttttttttttaatacagatggggtttcaccgtgttagccaggatggtctcgatctcctgacctcgtgatccacctgccttggcctcccaaagtgctgggattacaggcatgagccactgcgcccggccgttttgttttgttttgagatggagtctcgctctgtcgtcaggctggagtgcagtgatgtgatctcagctcactgaaacctccgcctcccgggttcaagcgattctctgcctcagcctcctgagtagctgggattacaggcacccaccaccacacctggctaattttggtatttttagtagagacagggtttcaccatcttggccaggctggtcttgaactcctgacctcgtgatccgcctgcctcggcctcccaaagtgctgggattacaggcgtgagccaccgcgcccagcctatcctgcacttctaatcagatctgacatcacttccaacacagtaaccaaaaccctcatcagctcatctgttttcttgggcccggagtcacatagaaaccagaaagctagaaagagccgtttctctcacccagccccagaggtggtcagcacagatggttggtgctcagggacagaacttgccctgctggcctgtaagctccctcaatagaggattttacctgcaaggacaagggtgcttttcatctttacagaataatgatctccagcaggatgccaagactgctaagctctgtgtgccctgcagactcgcacagagctggtgcttatgaggcaggcgacagtgtaagtctgaggacagaacaaaagaaaaacttacctgcatctgtcctctgggccatgcaggaatagacagaggcctgtaaatcacccaaggccactcccacctgcgtcccctttgggatttcaaaccacatgtgggaagttctgcccgccacactgccaggctcggcgatgtctgggagcaggtggacaggaaaacccgagctcctcagtctgtaaaacagaagtggacacccacatggacccacagttaggtttcgggaatttaagggatccttccttccttcctcccttccttctctccattcctccctcccttcttcctttcctttcctccctccctcccttctctttactccttccctctttccctcccttcctttcctccttctctccattccttccctccctccctccctcccttccttccttccttccttctttctttcttttttacttatttatttttttgagatggagtcttgctctgttgcccaggctggagtgcagtggcaccatctcagctcactgcaacctccacctcccaggttcaagcaattctcctgcctcagcctccctaatagctgggattacaggcgcacaccaccatgcccagctaatttttgtatttttagtagagacggggtttcgccatcttggccaggctggtctcgaactcctgacctcacatcgttcacccgcttcagcctcccaaagtgctgggattacaggcgcgacccaccacacccggctccttctttctttttttgagacagggtctagctctgttacccaggctggagtggagtggtgtgatcactgctcactgtaacctcaacctcccaggctcaagcaattctcccacctcagcctcccaagcagctgggattacaggcctgcaccaccacacccagctgctttccttttttgttgttgtttgtttgtttccaggaaactctgcatgggaaagtgctataggacacacatggccgaagtggggatagaattcagtgccctcacaggcagcttctctggcttttttaaaaccatgagcttaggctttgtcaatagagtacactggctttcataagcttaggattcaccttccaggaaagaaaacaaacaacataggcagccgtgatcaagtccagcctcccatgtttgaagggagctcaaaaactctgcaaagggaggcagccggaggttcggcgccattatggttggtgagcacagcccaaaccaaagtcaaatgcagcaggctcctgaatatcaaacgtgttagtcactcagggttagtgaatgggaagctgtcaacttcacacaacatgctggaaagtcctttacctgaactaccaggtgctttttgttttatttcagagctcagaatttgggccctgaaggaagtgaacttacagggcactggacttctgtacctgaaaaggcaaatgattgttcaaaaagaacttaaaaggcatccttcaagcctactatctctagttcttttttctttttttttttttttgagacaagagtctcgctctgtcccccaggctggagtgccgtggtgcaatctcggctcaccgcaacctccgcctcccaggttcaagtgattctcctgcctcagcctccagagtagctgggattacaggcgcactccaccacgcccagctaatttttgtatttttagtagagatggggtttcgccatgttgcccaggctggtctcgaactcctgacctcaggtgattcacccgcctcagcctcccaaagtgctgggattacaggcatgagccaccgcgcctggctctctaagtttaagtattaaagagtgaaagctgtactctgaaacctacagactgggctcatggtcacagagaagggagagcccacctggggtctgggcggctgtggaggagcaggacagcatggctgaggcccctacccaagggctcagggctgtgcttacactgggcccatccatgccccgtgtctgggacaggccaggggcactggaccctgatcctggcctctgggaaccctccaccactcccagatgggaaagcacccactgaagcactggctccggggttgcccttcagattggagcaggaggaacagcctgcaaggatgtgatactcacgtctctacgttccagctttggctctgcgtgttgaaatagccccagctggcagcattctggtcggacatcagaggtcttggcaagccacacagcatggcaaccacatagtcgtggatggtaccggctgcgtcgtaggacttcaggaactctgggctgtttttcataccaaaaacaaccaacacggtataacatgaactcggaagcatgtgccgcacctagctgcaggcagcagggaccagctgtgccatggccaggtggcagccacaaccgcatatactatggctcaagtccagctgggtccctgggattaggacctcccagctgccccaagcaaagccagcctaagtcagccccaggggaagggcctgagaggaggaagtgtcaagcctggaaaagcagacgtcagcctcctcagcagcctcgcaggcctgaacacactgcgaactctccccgtgaccctcggcaagtcacttgccctctctgttccctcctttccctatgtgggtgggaactggataaccaatagagagccctctgcaaaaggacgtggttctggacccaatcgaggtccaggccatgctgcatcctgtcctgccaggacacactcactgcggcacagcccagcaggcggggtgatgctgacgcagccccggcctattctcattctcccggaaacccagcacccgagtgaaagtgcagttgcccgtaccgatatttcaaaagccagaagatggttgcacagccgaagcccgtggccacactgagatgagacttcggctggggcagagaggccaggaattcgctgctacatcggccatcctgccacgtgaccaggtggctaacagctcggggctcgaacaccggggtaatccctccctctgtccattcacagcctggaacaaaagagatgaccaaaaatgaagaaaagagcaaatgactaggcatggcgcggccttgatactactctgctggtgagtgacaaaatatgtgcgaatcgtcccatgataaagcctggcacacctatgggtcctgatagcactggctttagtacttggctctaccacataatgactgtgggaccctgggcacgtcacatactccctccatttgccccacttctctgtttgtttttattcttttttgaagttgatatcatatctccccacatctcagaagatgtttggcacaatctcaagtcccctggtctctgtccctccaaccctcatcatgacattatctaggcttactgctacttgattaccagtaaattttctcttttccttagttcttagctgattgcgttttattttattttattttattttaattttttcagacagagtctcattgtgtcccccaggttggaatgcagtggcatgatcccggctcactgcaacctccatctcccaggttcaagcgattctcctgcttcagcctcccgagtagctgagactacaggcccacgccaccacgcccagctaattttttggactttcagtagagacagggtttcatcatgctgcccaggctggtctcgaactcctgagctcaggcaatccacccacctcagcctcccaaagtgctaggattacaggcatgagccaccgcacctggccctgattgatttttagacatccaaatttactttaaaatcatctgaccgtcagattttttttcatttgtgccttgtgacatcctctggatttttctctgcccttattcagtgatttctcccaaggccaatttcagtgtcagtctttccaggcagtgtctgaaggcccagatgccaccaaatatttctcatgttcccatctttaaatgccagtttgattagttataatagtctggttctaagttccttcccttcaatgcttaaaagcactttttgtggtcgattgttgcaaattcttcactactcctcccattaagaggtggcatctgaatcctctttccttgaatatagaatcaccttggtgacgtgcttgaccaggagaatgtggaggcagtcacatcttgggactcccaaggctaggtcataagaagtactgcagctcccgcccaagcctcttacaccagtctctctgggggaatcagccttcaggtaagaagtgcgactacgccgaggccgccatgctgaggagaccacgggcaaagagcagccggcagaccgtttccaggtgagcccagcctccagccttcccaccaaggtaccaggcattgagtaaagccaccgtgaccccctggaccagtctgtccaccagttgaacactaacaagcaacctccaccaccaccatgcagaagcagcagtgggctgagccctgcccaacccctgacccaaaaaatcatgacagatgataaatgcttgttgctttcagtcactaggttggaggtagtttgttgtgccgcaataggtcatcaaaatactactcctggtcaggcacggtggctcacgcctataatcccagcacttcgggaggccaaggtgggcggatcacctgaggtgaggagttcgagaccagcctggacaacatggcgaaaccccatctctacaaaaaatacaaaaattagccaggtgtggtagcgggtgcctgtaatcccagctactccggaggctgaggcaggagaatcgcttgaacccagtaggcggaggttgcagtgagctgagatcgcaccactgcactccagcctgggcaacagagtgaggctccatctcagaaaaacaaaacaaacaaaaaaatgctactccattgtcttttcacacagaatgctgctgttgaaaaaaatctaatgtcaatctgatccttattctttcatatgggatctgatcttttgctctgtaagcttttggaattctgtctttgaaatccttaaaagttcactagaatatatctagctgggggttgtctttatctcctctttgacattctatgggccctttcaggctggggtgttctatcttatgttgtcaattataggaaatttttctccattatttcttcaaagatttcctcctctccatttttatttttccctttctggtctcttatgatttagatgctagtgcttctgtttgtatcctcaatacctcttagctcatcgggcgcagtggctcacacctgtaatcccagcactttgggagtatgaggcgggtggatcacttgaggtcaggagttcaaggccagcctggccaacatggtgaaaccccttctctgctaaaaataccgaaaaaaaaattagccgggcgtgatggcgggtacctgtagtcccagctactctggaggctgaggcaggagaatggcgtgaacctgggaggcagagcttgcagtgagcagagattgcgccactgcactccagcttgggcaacacagcaagactccatctcaaaaaaaaaaaaaaaaaaaatagccaggcatggtggcgggtgcctgtagtaacagttacttgggaggggaaatttaggcaggagaatcacttgaatctgggaggcagaggttgcagtgagcccagatcgctccattgtactccagcctgggtgacaagagcaagactccatctcaaaaaaaataaaaaataaaaaaaataccagttttccactccctttgccaactctcgacattacggaacattttgatttcttaccatccaatgggtggaaaatgatgctttgttgttttcatccgcacagctctaatgactaacaatgctgaacatctttccagatgtttatcagccattggtatttcctcttccaggagtaacctattggtatccttcacccgtttttccacagagctgcttgttctctcttagttactggttctttacacgtgctgacctgtcctttgtccactattcactaccagatattttctccctgtctgctgctcgccttttagctttctttgatgatcctggttgctcttctgcgtttactgagcctgaaaatggagtttggaaacaggcgtaaccacaggcctttcagaagacactaatcactccgtctcctcccctccagctcgctccgggtgccctcactgaagcacttagctctctgctcaagttactcctgcccatctgtgttgactgtgttttggaaggtagaggctgcattccttcatttctatctctcccccagggcctagcaaagcgttttataggttgtaggtaggaaaaccaaagtgaattaaggctgccattaaaatcgacaagactggatcccaaatgtgatttcacttgacttcactaagcaggtatcaccatcaccacactgtggctttcctccttcccagaaacagaaaacaatcccagaaggcatgtgggctggctcaataaaatattaagcagctctttccaacgatgtggctgatggtttgtgtggttgttagagagcccaggagacaggcagaaaggaaggcatgtgaccggatcacaatcatcagctctctgctgtcctctttgggaagggttttagtattaaaaggacatttattctcattaatgcaaaattaaggagttttaaaagcttttacaacctagactccctctgagaggttagccttgacaccctaatcgccttctgctcccgccactgctcggtgccaagcagctcccacggccccggcgggtctgatgatagccggacaggagggaggaaggggaggaggaagagcctgcatcagctcctacgattgcccagccccatcctgggagtgattaaacggtgcatcaccaaatgccagtcccactgacaggcaggtcaccgtgcacttcagggcactctaaattgccgactctccatgtagagagggatgaatccaatattgaaatcctcataactacagccccccaaagtagccgtccatcttctgcttaaaatgttgatctgtagtaaaatgttgattttgttgaagctgagtgatgggtatatgctgttcacagtactgttctccctatttttgtttgtctaaattaaatctttcataatttcttttttttttttttgagacgaagtcttgttctgtcgcccaggttggagtgcagtggcgcgatctcggctcactgcaacctctgcctcccgggttcaagtgattttcctgccttagcctcccaagtagctgggattataggcacacaccaccacacccagctaatttttgtatttttagtagagatggggtttcaccatgttggccaggctggtctctaattcctgacctcgtgatctgcccgcctcagcctcccaaagtgctgggattacaggcgtgagccattgtgcctggccaatataatttcttttaaagtttgatttgttgttgtcgttgctttctgagacggggtcttgctctgtagcccatgctggagtgcagtggagcaatcacagctcactgcagcctcaacctccaggactccagtgatcctctcacctcagcctcccaagtagctgggactataaacatgtcgcaccacacccaacttatttttgcatcttttgtagagatggggtcccactatgttgcccaggctagtcttgaactcctggcctcaagcaatactcctcctgcctcggcctcccaaagtgttgggatttacaggtgtgagccaccatgcccggccttaaaaagtttttttaatgccttccataacagggagctcccaacttcctgcaggagcctcatccttgggcattctgctgggaagtctctcactgagccactgtgtccccttgcagctctggtcctccatcaaaaacaaccctgccaggcctttaaaagctcctcggacagacttggattcaaaagtggggttcacctgctgaaatatgaccctgagcatattattctaacctctctgaacctcaacctctcatccacacaatggggacaacagtgtaatctatgtcaccaggttgttgggaatatccgacgagatcatgcaactgatgtcctcagccaggcaccaggcatgtgaagtgctcattgtggttttactgtcttaggttctcctcctcaaggccaaatagaacaggttacccacctccgcactgtggcagatcttcataagacaaccaactagaaatgcttagcaactgaacccataaaaaggatatgccggccgggcatggtggctcacacctgtaatcccagcactttgggaggctgccggtggatcatttgaggtcaggagttcgagaccagcctggccaacatggtgaaaccccgtctctactaaaaatacaaaaattagctgggcgtggtggcaggcacctgtagtcccagctactctggaggctgaggcaggaagaccacttgaactcgggaggcagaggttgcagtgagctgagtttgcgccactgcactccagcctgggtaacaagagtgaaactccaccttaaaaaaaaaaaaaaaaaaagatatgccctggaattttcaaaatcacaaatatgtaaacaacgacaaatgtgccccaattcaaaagcatgccctccatgtcctggcatctcctgcagctatagccagtctctcggttgtctgcactaatgttctgagatactgacatggtaaagagaaagctatggaaaatgcactctgctgaatccttcaggagaatccgagaaaacactctcttccctctgcctgttcgtggataacgtgctgatgatgtgggagtgggcagttcctttgttcacctaacattggtacagaatgctcacccacgcaggaggcagcacgtattcgtccactccaagaaacaagaccctattcccactgcaggataacccgacccttcacagaaagccccgcacagcactgctctagttctggaagtgactgctaccagcctgagagcatccccgagcccagcataccttggcctgttttccaaaacacgactccatgcatctggcccgacaccccgatgcccacgacgctccggagctggggtcggggaagggcagcaaggcactcgtgtagggcttggaggattctactcacatcctgctcccgcccctggaagcaaaagagaacacatgggcaggggcagacacacaggcagggggaggggcgcaggcctcccgggatgtcctggaggaggaatgcagtgggcagcatccactccctaacttcacagttgaggcactgctgcaggtgagttgcagcaaactgcctgggcctgccctccactggggtcagactcagctgagaacagcattctctgtgctataaatagaagaaataaggccaggcactggtggctcaagcctataatcccagcactttgggaggccaaggtgggtggatcacctgaggtcaggagttcgagaccagcctagccaaacaacatgatgaaaccccgtctctactaaaaatacaaaaaattagccgggtatggtggcatgcacctgtaatcccagctactcaggaggctgaggcaggagaatcggttgaatctgggaggcggaggttgcggtgagccgagatcacgccacggcactccagcctgggtgacaaagtgagactccatctcaaaaaaaccaactagaggaatccacagaaagttcagaagagaagaaggggaagagaattgtggctcagctctcaataaatgtcagctctttgaggaactagcaaagctaaggtcttagaaaggcatctgaaggctgagttctcagacgtcttgcttccctcccgggagtgctgtcttcccctcctcggaaaacctctcgcttgcccctgtcagcctgcggccttggtcaggggcagctcttggctcctaacaagcaggaacaaagaagagaaagaagggaggagaggaggggtaggatggggcagggagtacaggggaagcacagccttttcctaggaagcagccccagagctcaacaaggattctacatgcaagagaggccacagccaagaggaagtggaagacaagaggcacagaggagccaggtggctatgcaggatcaccagagggaggaaagaagagcagggtggggacatgggggtggggggcaggaagaagggttctgggaatagacatttgtttagaccctcactgtccaatactgaaatcgttagccacttgtggctagtctgaattgacatgtaaatgtaaaacatgcaccggactacaatttagtatgacaaaaaatatacactatctaatttaatgctttttttttttttttttttttttttttagcgatagagtctctctctattgctcaggctagagtgcagtggcataatcttggctcactgcaacctctgcctcccaggttcaagtgattctcctgccttagcctccggagtagctgggattacaggctcacaccaccacgccgggctaatttttgtatttttagtagagacggggtttcgccacgttggccaggctggtctcaaactcctggcctcagggattcacccacctcggcctcccaaagtgctgggattacaggtgtgagccaccgcacccagccttgattatcacacatcaaactgataatgtgctggatacactgggttaaataaaatatgcaattaaaattaatttcacttgtttattttaatagggctgctagaaaattgaaaaggccacgcctggctccatttgtaggttacatttctttttttttgagacggaatctcactgtcaccaggttggagtgcagtggtgtgatctcagctcactgcatcgtctgcctcccaggttcatgcgagtctcctgcctcagcctcccaagtacctgggactataggtgcgcgccaccacacccggctaatttttgtatttttagtagagacggggtttcaccatgttggccaggatggtctcgatctcttgacctcgtgattcgcccgcctcggcctcccaaagtgctggcattacaggcgtgagccaccgcgcctggcctgcaggtcatatttctactggacagagctagtttaaagagtcctcccagctgggcgcagcggctcacgcctataatcgcagccactgggaaggttgaagcaggagatcacttgatcccagaactttgagaccagcctgagaccagcctcagcaacacagtaagactccacatggccatggggtggtgtgtcatcccaggacagagctgctgtttcaaatggtcccagggtgagtgggtgcgtgagttgtgtggggggagacacgggaagaagtaagcaggctggatgtggtaaagacaaggaggcagtgttcagcagttagaaacagttttaggggcgggtgtgattggggagtagctcttggacagacccccagtgtaacaggaatagacattgcccccactccttggctcagaatatcagttggtctacatccacgtcgaatcctcgcgctttagacttgcacacagtacttagaagctcattaaatcctactcctcaggcctctttttacagcggaggaaactgatgcccagagaggaaaaataaatataaactgtgaaagggtcacagaactgccctcgaaaaccttgtattttaaatgggcaaataccaaaaactgattgtctgcacagctgccaagcttgaccctggtatagctaatacttatgagtgaaaagtatgaacttgaggaaagaacacagccagcagatattacttttttttttttttttttttttttggagacagagtcttactctgttgcccaggctggagtgcagtggtatgatctgggctcactgcaacctctgcctcccgagttcaagcaattctcctgcctcagcctcccaagtagctgggattacaagcacgcatcaccacgcccggctaatttttgttattttgtagtagagacagggtttcaccatgttggccaggctggtctcgaactcctgacctcaagtgatccacccacctccgcctcccaaagtgctgggattacaggcaagagccaccgcgcccggccacagatatgactatagatcactggttcctactcggggtggtcttgtcacctagggaacatttggcaacatggagacatttttggttgtcacatctggggaagaggggcaagcgtggctggcatctagtgggccagagatgttgctaaacattctacaacatgcaggacacccctcacacaacaaaaactatgcagcccaaaatgtcagcagcaccaaggttgagaaaccctgctatatagactaactcacagcagtgctgtttgtcccagagcacgattcatatgtggtgtgggggggttaatgactggcctccgctaagcacttcattaaataggtgtgacacactgggtgagcctgtaagcacagaacagcctgctgaaagctggggagggagggcagaaaagttttcaagaagtggccgtgctgccgcccctactgggaagtgaggagcccctctgcccggccaccaccccgtctgggtagtgtacccaacagctcattgagaatgggccatgatgacaatggcggttttgtggaatagaaaagggggaaaggtggggaaaagattgagaaatcggatggttgctgtgtctgtgtagaaagaagtagacatgggagacttttcattttgttccgtactaagaaaaattcttctgccttgggatcctgttgatctgtgaccttacccccaaccctgtgctctctcaaacatgtgctgtgtccactcagggttaaatggattaagggcggtgcaagatgtgctttgttaaacagatgcttgaaggcagcatgcccgttaagagtcatcaccactccctaatctcaagtacccagggacacaaacactgcggaaggccgcagggtcctctgcctaggaaaaccagagacctttgttcacttgtttatctgctgtccttccctccactattgtcctatgaccctgccaaatccccctctgcgagaaacacccaagagtgatcaattaaaaaaaaaaaaaaagtggccatgctgggtgcggtggctcacacctgtaatcccagcactttgggaaaccgaggcaggcagatcagttgaggtcaggagtttgagaccagccttgccaacatggtgaaaccccatctctaccaaaaatacaaaaaaattctccaagcatggtggcgcacacctgtaatcccagctactcgggaaactgaggcacgaaaatcacttgaacccgggaggcagaggtttcagtgagcagagattgcaccactgcactccagcctgggtgacagagcgagaccctgtctcaaaaaaaaaaaaaaaaaaaaaagaagtgctctatttcaggagaaactggcactttctgagcctactctcccctaatgccagctctcctgctcaccccaccagggtcagagccaactttgcctccaattcatagtcctttaagtaagaatccttttaatatgccctaatgtcccaaccaaactaatcttgaaagcttctatgtagatacaaagtgctcctgaaatccctatcctcagaaatgcttctgagccaaatgggctctgaaccctaaacaaccgtgtccatgtatgtggcaagagcttgtgaaaaacaaagctgggccaggcgcagtgactcacaactgtaatcctagcactttgggaggctgaagtgggcagatcacttgaggtcaggagttcaagaccagtctggcgaacatggcgaaaccctgtctctactaaaaatacaaaaagtagccgggcgcggtggctcacacctgtagtcccagctactcgggaggctgaagcaggagaatcacttgaatccagttggcggaggttgcagtgagcccagatcacgccactgtactccagcctgggcaacagagcgagacttggtaagaaagagaaagaaaggaaagaatgaaggaaggaaggaaggaaggaaggaaggaaggaaggaaggaaggaaggaagggaaggaagggaaggagtctcgctctgtcacccaggctggagtgcaacggagcgatctcgactcactgcaagctccgcctcccgggttcgcgccattctcctgcctcagcctcccgagtagctgggactacaggcgcccgccaccacgccccgctaattttttgtatttttagtacagacggggtttcaccgtgttagccaggatggtctcgatctcctgacctcgtgatccgcccgcctcggcctcccaaagcgctgggattacaggcgtgagccaccgcgcccggctgaccaaaggtttcttggtccgcattctgcttctgtggaatgagccaggagccagttaggcctgatttgacatctgatttccggaggaaaacccagactctgccctgggcaacaaactgaatcctgaacttgaggtcacagggcaggtgtgaggagcggagagcagcaagagtgaaagggaggcctgtggtcattccatacacacaagagatcagttcctccaaggtcaggggacagagagcacagggatccagcgccaagcgcaaggcccccagaagaagccagagagtcggggagggggcgggggggaatcggtcccagcaggtgggaaggattctgggaccagacctaagggatcatgagcacagctgctgcaggcagacgggcccctggagaagctggggacaagctggaatagagacttcattgcgggaagggctgtcagggaggcctcctggggtggaaaagggtggtcaggaggctcctggaggcggcgcggccccgggggtccaactcacctggggcccggccaccgcgctctcgaccgccgcctctgcccgcgcagcacgggcacagctcgccagcactgcgaacccggatgggtcgtcgggcgcggccctcagcagagctgccttcacagatgtggtgcccaggtcaatgccgagggtgatcggccgcgcagccattatctccctgacccgcgcagctccagtctgcagccagcggccccacaagtccgcgctcttcgcccaggggggcggggcaggggcggggagtcgcctgccaatctttcagccacacccaacatggaggcttctcgtcttcccactggccggggaaggcgagcttccacgcaacctctcggcgggccccggctataggcggagaggcggcggaaggcgggacctaaagggggccccgccccacgggctctgatttccgcccaatggagggcggtctgagcttcgctcacgaaaggagccgggaggcgctggcggctccaagagtctctgtgtccctggcagcggacctcatcttccctcacgccggagccccgatctctgcgccccggcccgacccagctgcgctctgtccgtctaagacgcgcggaaactacaactcccagagctcatctcgccgagatccggccccacgagtcaggtggcggaggtcaggtgacagcggacccgcctctcccaaagtctagccgggcaggggaacgcggtgcattcctgaccggcacctggcgaggctcatgcgtcccgtgagggcggttcctcgagcctgggggcgctcaggtgagagcggacgcggcctcccctgtttcccaggcggaccccttgaggcacagcaggtcagcggggcagcctgccgggggtccagcgccctcagccgcggcgggctcctttccccgccaccagtgctggcctcgcgacacgggacaacccccgggtggaagggcccgagcggtggtcagccgaggcaggggcagcgggctgccggggtgggtgccgttcccagccccttaccttctgctcagttgccgcctgggtctcggttggggaatttgcagattgctttggagacgctgagagaacctttgcgagagcgccggttgacgtgcggagtgcggggctccgggggactgagcagcacgagaccccatcctcccctccgggttttcacactgggcgaagggaggactcctgagctctgcctcttccagtaacattgaggattactgtgttttgtgagagctcgctaggcgccctaagcaacagaggtaaccactttatatccttgtttctcaacctcgttattcctacctacccccttcccataaaatttaataccactagtacgctgtgtatttgtttctgtggccacaaaccattgtaatagctagatttcttcactaccaccccaagccaattttttttttttttttgagatggagtctgcagcctctgtcacccaggctggagtgcagtggcgcgatctcggctcactgcaacctccgcctccggggttcaagcgattctcctacctcagccttccgagtagctgggactacaggcctgagccaccatgcccagctaatttttgtatttttagtagagatggggattcaccatgttggccaggctggtctcgaactcctgacctcaggtgatgcgctcacctcggcctcccaaagtgctgggatgacaggcgtgagccaccgcgcccagcctacccccagccaattttagtcccacttgacaatgcgtgctttacatctcctcatttaagtcctgtgaggtagttaccacctccttgtttggcaccacaaggtcgcataagtaataaataggtcaagcctgtctccagtgcacacagcccttgccactatttgtgtaccctctccaaaagcaggagacccagggagttccaggtcgtagaacagaggacaggaccaactcatacctggcagacaggagctgccacactagacccctagccccaggttgctcctgggaagggactgaatgggtgaggagccttcttgaaacatgtgacatctgaatgaggcctggacaatagttagaacttacataggaagggcacgccagacagagcccattgtcaggagatacttcatttctatcttgtagctttcacaagccactagttgtatgtaattatcaatctggttttttttttgttttttttttttaatttgagacggagtttcactcttatcactcaggctggagtgcaatggtgcaatctcggctcactgcaacctccacctcccgggttcaagcgattctcctgcctcagcctcctgagtagctgggactacaggcacatgccaccacgcctggctaatttttgtatttttagtagagacggggattcaccatgttggccaggctggtctcgaactcctgacttcaagtgatccaactgcctcggcctcccaaagtgctggaattacacacacgagccactgcgctcagcctaatctgatgttttttaacattttaattgacttacctctcaatgtcgttttgtctctgctggcatcgttcctccaggggtctcagcctttgaggcttgggaatgtttgctgaccaagtctgtgagtttgagaagctggttaggcctgattctgcatctaatttctggagaaaaaccagactctgtcctgggcaacaaactgaatcctgaacttgaggccacagggcaggtgtgaggagcggagggcagcaagagtgagagggaggcctgtggtcattccatacacgcaggagggcaattcctccaaggtcaggggacagagcacagggatccagcgccaagagcaaggcccccagaggaggccagagagtaggtacggggtcattcccggccggtgagaagggtctcagatgaggcagacctgcagcaggcaaagagagaaccctggaggagacgggccaacagaggtcagacagctggagcagccagggagacttcttgaggagtgtgtaagggagatgtccggagatgctggaggccttggggaaactgaaatcagagtgggaacagggatgtctccacacagaccttacccagagctccccacagtctgcaggaggcccgtgagactgtgtactgaggcagcacggagaccaagctacagaaatccatgccggcctggctgctcttgacccactgttcacctgctgtgtcttgggtttacaggaatgcagctccccatcttccacactaaaccaaggacttgctctggggctcatccctccccgagtcctccttgtgaatgaccccagccagtcctggaatggtgacacttgtcaaataaagtcttgacaggcgcggtggctcctacctgtaaccccagcactttgggaggctgaggcgggcggatcactcgaggtcaggagtttgagaccaggctggccaacatggtgaaaccccatctctactaaaaatacaaaagttagccgggcatggtggggggcacctgtaatcccagctactcaggaggctgaggcacaagaattgcttgaacccagggggtggaggtttcagtgaacagagttcgcaccactgcactccagcctgggcaacagagcaagactctgtctcaaaaaaaaaaaaatttaaatatgtatattaaaaaaaaatgtttttttaagtcttaagggtcagttggtgtcatcagcccttagactcttatcccaggacaggaaaggaaattaatttccttgaggtttataggttcacaatgtcaaatatctgaccacagttttaacaacttttggagaaaaagaatctcaagccagtaaaattgcattctttctttctgctaactaagtttttacaaaaagcaattgaagagggaaaaattctggtctttgttcacttcctcaggggggcactttacacaacccatttatctgctcggagcccgtttcccctgtatatcaaagaaagataagtcctctctagggtgtccctctgaggccgtgatgcaaagccctgaggtcacagctgtcaggtggcagtcctttatgagccatccatgctccagagggcagattgtctacagggagctgagctgattcaacattcccctgaacttctctcttgctgtttttcttcctagttctgagaaatcgagaaacatgataaggaattggctgactatttttatcctttttcccctgaagctcgtagagaaatgtggtaagtttagaaatgacacgtcaactttgtaaagagggaaatggtggctagaggaaggagtaatctgatctgtttgttgccaagggtttagaatcattcagaccacatgtctctgtctgcctcttggccatgtggccactggggtggtggagcagacccaggtctgggatccaggtgttctgcaaagagccagatagttccacatataattggccttctgccctggtatctctgtacctttctgtaccaaagtgaacagctggttcttaaggtcagactatgcagctgattctcaaagtcaaacggtagagctccaacaacctgggataatatcttaaagactggctcaggctggagcagtggctcacgcctataattccagagctttgggaggccaaggcaggaagatctcttgaggccaggagtttgagaccaacctgggcaacgtagtgaaaccccatgtctactaaaaaataatttttaaaaattagccatatgcagtggctcgtgcctatagtcctagctacttgggaggctgaggcaggaagattgcctgagcccaggaagtcaaggctacagtgagttatgatcacactactgcactccggcctgggcaacagagttgagaccctgactttaaaagaaaaaaaagaagaatggcttatgcctctgccctgtggacctcacagagagagtcttgggtcctgggaaacactggggaagcagaagaggtagccaccctgttgtacccggttctgccaggcacagatcacctgaggagtctgcccagcatccccttgtaagatgagaaaacctgtcccttagagaggggctgaggaacagggtgcaacagcccagcagggctaggggtcagttggaacacaggctgggatggagtttacacgtccttgtaggaggaatgaccttcagtgcaggcctctttgaggcccgtgcccttctagcaattctcccactgcccaaaacatctctggaattccttccataaagagccatgtttagcacttcaaaggtgccaggcccattcatttgatcctcagcttgcctcttgggtcaaatacaaaaatcagatacatatatatatatatatatatatatatttttttttttttttttttttttttgagacagagtctcactctgtcgctgaggctggtgtgcagtggcacgatctcagcccactgcaacctccacctcccgggttcaagcaattctcctgcctcagcctccctagtagctgggattacaggcacccgcaactacgcccagctagttttttgtatttttagtagagatggggtttcaccatgttggccaggctggttttgagctcctgacctcgtggctcgcctgccttggcctcccaaagtgctgggattacaggcatgagccaccgtgcctggcccagataccttaaattcccatttcaagtgaaccttgacaaacaatacaaatcctgcagaggtttccccagagcctagcaccattgccgttatctggcctcttgcatctctgaggaaacatggtcacgtgatcatctcttccaggtttgttaaacaatcagtaatgtttgtagtcacactttgtggataagcaatttccgggaaaggcaggtctttcagaccctggaacctggtgtttcttaatacagacgtcagaaccctgtccccaccctgtaggatcagactttgtaagactgaggctggagcatgtgcgtgtgcctgggagtgtgcgcgcgcgtgtatttgcctgggcctgtgtgtgtgtgtgtacccgggcgtgtgtgtgtgtgtgtgtgcctgggcgtgtgtgtgtgtgcctgggtgtgtgtctgcgtgcatgtatgtgtgcccgggcgtgtgtgtgtgtgtgtgtgtgtgcccagtcgctcatacatactctttaaagccccattagtaatgctaacacgctcccctaggagaaaaacaaaaaatccagctaccaccactccagttacctggaggggaagcaggcccagagagggtagaaggcttccccaaagtcacacagctagaaagtaacaaagctgggacctgcataggatccctgctgcatgagatcactttgcctcctttcctgaatgccattagaaaagaatgggccaggtgctgtagttcacgcctgtaatcccagcactttgggaggccaaggtgggtggatctcttgaggtcaggagttcgagaccagcctggccaacatggtgaaaccccgtctctactaaaaatacaaaattagctgggcatggtggcgagcgcctgtaagcccagctacttaggaggctgaggtaggagaatcgcttgaacccgggaggcaggaggttgcagtgagctgagatcacgccactgcactccagcctgggtgacagagcaattccccatctcaaaaagaaaaaaggaaagaagaatggaagccaccataaaatcaagtcactggaattgaatctccaacctcattctgcccttgctgtttctttcttctctttgctttgggtagtaattatgaaggaccacagatgagatgattggccttcagacttgtctgtctctgacttctctgggtggaatcttgaggcagtgcagcctcatggcaagaacctgggctttggactagacaggcctaagtttgaatcttgccctcaccattttcaagctgtgtgggcaagaaacctttcctcttagaatgctcagtttcctgaaatgtaaaataggaataataatgcctacctcggcctggcgcgttggctcacgcctgtaatcccagccctttgggaggccaaggagggtggatcacaaggtcaggagatcgagactatcctggctaacatggtgaaatcccgtctctaccaaaaatacaaaaaattagtcgggcgtggtggcgggcgcctatagtcccagctactcgggaggctgagacaggagaattgcttgaacccgggaggcagaggttgcagtgagtcgagatcgtgccactgcactccagcctgggcgacagagcaagactctgtctcaaaaacaaaaaaaaatgcctacctctcacttttgtaataattagaaaatgggagctcggtgtatagcagagtagctggtattgggtaggtgcagagtgggagagaggcctataagaattaattttaaaaacctggccaagcatggtggctcatacctgtaatcccaacactttgggaggccaaagagggaggatcacttgggcacaggaatttgacaccagcgtgagcgacatagtgagaccccatctctacaaaaaaaaatttttttttaaacggattctcactcagttgcacaggctggagtgcaatgtggcgtgatctcagttcactgcaacctctgcctcccgggttcaagcgattctagtgcctcagcctcccaagtagctgggtttgtagacgtgcgccaccacatccggctaatttttgtattttcagtggagacagagtttcaccatgttggccaggttggtctcaaactcctgacctcaagtgatctgaccgcctcagcctcccaaagtgctgggattacaggcgtgagccaccgcacccggccaaaaatttttttttaattagctgggtgtggtggtgcatgcctgtgttcgtagctactgaggtgagaggcggcagtggtgggaggatggcttgagcctggcggggtcaaagctgcagtgagccatgatcactctctttaggaggaactcaggatggtgttgtgactcattttgtaaatctgatacaatgtaaagattttagacttggggggccagcttcctaactgcctcccaccttgggctaaaaatatcctgcagttatcatgtgatgataataatagtaacaattatttagcatctgggctttgtggaaaacatgttacaaacattgctacattgtatcttcaccatgactcattcagataggtcttggtattctccccactgtacagataaggaaatggaggctcagagagggtaagtaccttacccatggtcacacagctaggaagtgtcagagccaggatggaactgcgtgactttggagcccaatatctcagttgctgagcacctcagttttctgtggtgctaaagaaggagggaataaacattctctggtctggttcttggagtgttcacaaactcctattttatttttttattttattctattttgttgagacggagtctcactctgtcacccaggctggagagcagtggcgcaatctcagctcactgcagcccccgcttcctgggttcaagtgattctcttgcctcagcctcccgagtagctgggattacaggcgcctgccatcacgcccagctaattttttgtatttttagtagagacagggtttcactatgttagccaggatggtctctatctcctgacctcgtgatccacctgcctcggcctcccaaaatgctgggattacaggcctgagccaccgcgcccggcctaattttttgtctttttggtagagatggggtttcgccatattggctagtctggtctccaaatcctgacctcaggtgatccacctacctcggcctcccaaagtgttaggattacaggtgtgagccgctgtgcccggccctcaacctcctatatgcaaagattgtaggagctctgtagccatgtagatctcccactcaccttgacctccactacctctggcagagccctagggatccagagtctggctggccgcccagcatcactttcagcatcctgtcctgagcagtggctggttgtgggacttgcttatctggcatggtcctcagctctaggcagaattgaactggtggtacaggaagtcccagctatgcaagcccagaagaaatcctcagaatgacctcagaacagtgagcctgaaaaagaagggcagactcgccacagcggcttccaggctctgaggctccacataaggaagggactgccttttgccgctctgagcaccttggcctctgcaagggccaggggacatcctgttctgaggagcccagccagccagcaggggactggagattgtggactgtggggacctacggacttgggacagagcttccatctgtattcacatgtgctgagcatggagaaggcagctctcagggtctgagaggctctgggtagcagagcctggcctggcagggcaagcttcaggctgtgatctccttagaggagacgaggttacagaggaagagaaactaccaggtaggagtattgaggcggagaatcagaggtcaaattgggtaactttaagtttccttccgggccaggtatggtggctcacacctgtagtcccagcgctttggaaggccaaggcaggcagatcacctgatgtcaggagttcaagaccagcctggccaacatggtgaaacctcatctctactaaaaatacaaaaattagccagacgtggtgctgcatgcctataattccagctacttggaaggctgagacaggagaatcacttgaacccaggaggcagaggttgcagtgagcaaagatcatgccactgcactccagcctgggcaacaaagcgagactctgtctcaaaaaaaaaaaaaaaaaaaagtttccttccaacccaagcgtctaaaatttcagatctcaattcatctgcctttgaggggtctgagtgacagggtctgggtggggggaactgggcctggggggtctgagtgacggggtctgggtcggggaaccgggcatgctggcagcctctgccgttgcaaagacgctcctcatcacagtcatgcacctgcttccccgcccggcctagagtcatgaccataaccccaggctgtgtgtaaccctgaaggcaatcaggcaggggaagtgagatggcaggtgtggcatgagccttccagtacccctgggagcagaggctgggacggggctgcacaaagaatacaggaagcacacaaagagaggcttactcagtccggtgctctgggctagttggccttgcaagagggttttctttcttttttttttttttttgagatggagtctcgctctgttgcccaggctggaatgcagtagcgatctcagctcactgcaacctctgccttccaggttcaagcagttctctgcctcagcctccaaagtagccgggactacaggtgcatgccaccaaacccagctaattttttgtatttttagtagagacagggtttcaccatgttggccaggacggtcttgatcctctgacctcgtgatccacctgcctcggcctcccaaaaggctgggattacaggcatgagccaccacgcctgcccagttttctttctttttttaagaaaatattctgtagaaacagagtctttctgtgttgcccaggctgatctccagctcctgggctcaagcagtcctcccgccttggcctcccaaagcgccaggtttctaagcgtgagccaccacgcccagccccacgatggttttctaagaccctaagacccagatctgcttcttccctcatctgggggcctgtttgtcaacttgattctgagttaacagcttaatgccaagaagaaatctcagagtgaaacaactattcacccttcctcctccagtaccccgcagatagtcagccccaggaaggggaccagtgccagggtgagctgggttgggaagggaccccaaagggctccttagaaactcattagctgggcccatgtgtctctctgagagtgcaggaaaggggctggcccagttcttcaggaccattttgacttcatgaacagaggagacccctgtgctttcatctgaagaggtggttcacggctgccttttacgctcccaggtcacgctggaattcccctgtaatgatttttgggctccatggttctctaacaatctctggttaactcagccgcagactctcagagcctgtcatcgcagcgggaggaggacgctccggcgtttcctgctcaggcctgttttcctccatctctgtctctggcagcaggtggggaaggaagctaaccagggcctgtgtttgcagtcccatcacagaatagggctcgtcagagagtcagagctcaggagttcagatgtcaggggtttcggcccagttttctgtcacaggcctgaactctgacccagtgcctcatgtcattgatttgggtccttccagagtcaagcgtcagcctcactgttcctcctgtcgtaaagctggagaacggcagctcgaccaacgtcagcctcaccctgcggtaagttcctgggcctggcgctgtgctcagctccgctcaggccccgcagctgggtcagggctgacccctggctcagtctgttcagatttcagatgcgctattcttgcctcttacctgtaagacaagccctagaaaaagggatggtgctagccccgggctgcaggatgggatcgcaaaggctgacccccaccctgagtcctcactttccctggcaggagaaggaaggggtgcttctcccagagacgtgcgtcttttccccgcatgggaagagtcctgtgtgaccggtgttgaggccagatttcaaagcgattctttctaagactaagtatttgaagagagccctgaaggtcaaggggcagggagctgagctgctggttggcacttctgaggttgctttcagaagcaggagtggccacgtcgggtgaatgccgctcatgctgggccttgtctgggagtctcacttgctgccacctgctggcttaggcacaaacgtcgcgacctagtccagtctgtgccagggaggctgcctctgccttctctgctcttagctgctttgtccttcccttgcctcccagccgtgaggattccctgatgaagaagacctagaaccctctccttctctctttatgcctttcccccttcctcgcctctcctgcgagatctggcctgaaagcaaagctttggttccgaggcccctagcaggcctgccattccgctcccagctccttctgtctctgcacaccctccccctgcaaatcttacaagtcatctcttaccacaactgtccaggcccctggagtggcctcccactgcctttcagattaactccaggcctctaaacccagggccagggcccagaagacggcttccagccagcacatctgccttctcccgtcagatgcctctcccagctttccaagtccggactgctccctcctcattccctgcctgagccctctcctccttcagtcaaatgctggccctcacacaaggccccactcagacccgactctctgggaagcctttcccaccggagcagggagccacggtcctgggcctccagatgcctcatttgtcattcacacccaccttgctttcttctctgttctcaccctaccctgaagggacagacacctggtctcctgattaagacaggaaggcctacgggagcacgatttccacctggctacccatcagggtggagcacctagcatttcctaagcctaactgcttgagagttgaaggccagatgtgaaatccagagggttggttgagatctcactgtccagcttctcagcagtaattagactcttgtcctccacaggccaccattaaatgcaaccctggtgatcacttttgaaatcacatttcgttccaaaaatattactatccttgagctccccgatgaagtaagtaaccaatcttaacggatgggtagggaaatgctaggtaacagaacacatttgaattaagagctggtggaaacaggtctcctaggcggcccctgttccatcaacctagaaatctgtgattttggctttgttggtgtcttttggggatgagtatcacatgccattagatggaattaagaaggtgatagtgaggaacctgaggcaaaaatggttctgggaatgtaaacgttcttaccgggagtggtggctcacgcctgtaatcccagcactctgggaggccaaggtgagcgggtcacctgaggtaggaagttcgagaccagcctgatcaacatggtgaaaccccatctctactaaagtaaatacaaaaattagccagtcgtggtggcatgcacctgtaatccaagccacttgggaggctgaggcaggaggatcacttgaacccaggaggcggaggttggggtgagcctagatggccccactacactccagcctgggtgacagagtgagactccttctcaaaaaaaaaaaaaaaaaaagttcttacaattttcaaggcctggctgctcaaagggcattcaaggaccagagaattgggcttccttaggaacacagcatctcaggccccatcccaaacctactgattcaaagtcagcacactagcaagatccccaaatggtttgagtccacattaaggtttgtgaagcctcattctgagacaccactggttgggtgtcgtttccaaaaaccagtgccagaggccgtgtgatctaatagcgatcattacccatagctttatgcatgtatctatttgtgtgtaccctgctcccaccttactgagcatttgagccagttgctattcaattagataaaaagcatccacagaggaggtggcaaataagggtttaaataacaagatgaacgcaagtcactcagggcgcataacttctggagagctattgtacaacctggcgatatagttaacaatcatgtattactgcatgcctaaaaactgctaagagatagatcctaaatgttcccaccacagctgggtgcagtggcttgcacctatagtcctagctactcacgttcgtaacaacaacaaaaaaaagataagtatctgagatgatggatattaattagcttgatttagtcatttcacaatgtatgcatacatcaaagcatcacgttatatactgcaaatatatacactttttatttgtcaatgataccttaataaagctggtggaagcaggaggagaagaatgcagggatgagatcagtagccatgaggcacatcaagatgggctgcaaatcagctctgagccccctaggaagcaaacaggagtgaaacacgatcagtctccagcatgtgggaacctgtgatctgaaaaatatagcatcgctggctgcagagatgtgcacctgtaatcccagctacttgggaggctgaggcaggagaatcacttgagcccaggaactcaaggctgcagtgagccatgactgtaccactgccctccagcctgagtgttggagcaagactctgtctctaaaaaattaaaaataaaaataaaatgtttaaaaataacagcattgctgagaggggatctcggagtgtccagctaagaggaccccgcatgagagggagctctccccgctggtgagcaccttgttagtgccatttcccacacctcccctcttgcccagggtgtgaggccagcatgcagagccggtgggttcccacagcacagccctctgatccacagattaaattctgactctgggaggaacagatgctgattgcttcgtttagggccaaacatcgaagtcaaagtgtcatctttttatttttatgtattcatttattttttattttatttatttgtttagagacagagcttcactctgtcgcccaggttggagtaaagtggcgcaatctcagctccctgcaacctctgcctcctgggttcaagcgattctcctgcctcagcctcccaagtagctgggattataggcgcccaccaccaggcccagctaatttttgtatttttagtagagatggggtttcaccatgttgactaggctggtcttgaactcctgacctgaggtgatccacccgccacggcctcctaaagtgctgggattacaggtgtgagccactggcccggccattgattgattgagacagagtctcactttgtagcccaggctggagtgcaatggcgcaatctcagctcaccgcaacctccacctcccaagtttaatcaattatcctgccccagcctcccgagtagctgggattacaggcacacaccaccacacccggctaatttttgtgtttttagtagagatggggtttcaccatgtttgccaggctggtcttgaactcctggcctcaggcgatccgcccacctcggcctcccaaagtgctgggattacaggagccaccacgcctggccaaagtgtcctctttttaaaatcaaaaaagataccaaacaagccttggctgtaggagtccttgaacctgaagcacaaacagatccagcaaatccatggtgtcagtcagggtagcagtgaccctcggggccagcggaggctggaggaagcaagcaggggttccgaggacttgggaatgtttcatttcttcatctgggagctggatgcattcagtctgtagacatttcatcaagctgtgatgtgtgtacttctctacctatatgtcatagttcagtttttaaaaaagtcttcaacagtgagaggctgggcaccgtgggattacatctgtaatcccagcactttgggaggccgaggtgggcggatcacctgaggtcaggagttcaagaccagcctggccaacatggtgaaaccccgtctctactaaaaatacaaaaattagccaggtggtagtggtgtgcgcctataatcccagctactcaggaggctgaggcaggagaatcacttgaacccgggaggcagaggtggcagtgagctgagatcacgccactgcactccagcctgggtgacagaatgagaccctgtctcaaaaaaaaagaaaagaaaagaaaagtctttaacaatgagagtcaaaccattggtgtgagatggcattgatgggcaccaacctaccttttcaggctcctgcctcactggcccttccccacccaactctcaccactcccctctactacccgtgatgctggaagcctctggttagaacatgggagttgagtggtctaggagccaggcctgtgagccttgggtaaggcacttcaccccaatatagcaccgtctccttattcgtagctgtacagtgaataatgtttacttgacagccttgtgaagattaaaagcacaaacaagtataaaatgtctaggattgactgggcacggtggctcatgcctgtaatcccagcacttcgggaggccgaggcaggcagatcacctgaggttgggagctcaagaccagcctggccaacatgatgaaacccagtctctactaaaaatacaaaaattagccaagcgtggtggcaagtacctgtaatcccagctacttaggaggctgaggcaggaaaatcacttgaacccgggaggcagaggttgcagcgagccgaaatcatgccattgcactccagcctgggtgacatgagcaaaactccatctaaaaaaataaaaaatgtctaggattgtccctggcacatagaaagcactcagtgaaaggtagcgattatcacttcattctgtcttgtatcggtcaatcgactgattttctccctgcctagttccagaagggatttagtggccacttaacaaatatgcaagcaacgttgcaaggaatatctgttaaaaataagaaaaagtgagtggcaggaaaataaaagagccaggagtggcacatgttatgaagatgtaccttgtgagacgtggacgtaagttggactccaggctttgctgcagccgctataccatttcagttgtcctgccaaagcccctgatttctgatgctaagaacaagaaggcagtgcttcaagggtcctcattaagaagccactgaaggatgtggtagagcgcctgtagtcccagctactcaggaggctgaggcgggaggatcgcttgagcccaggagttggagtgatcagtgagctatagttgcaccactgcactacagcctgagctacagagcaagacctgcctctcggaaggccgggcatggtggctcacgcctgtaatcccaccactttgggaggccgaagcgggtggatcacctgaggtcagaagatcgagaccagcctggccaacatggcgaaaccccatctctacgaaaaatacaaaaaattagctgggtatggttgtgggcacctgtaatcccaactactcaggaggctgaggcaggagaatcacttgaaccctgggggcggagattgcagtgagccaagatcatgccactgcattccagactggcaacagagtgagattccatctcaaaacatatataataataggaaaccactgcagtctaatgagccagatcctcacggtacctgcaatatgggtggagtattatccagggagcacagaagctggggaccaggggagacagctgggttcagtaaggatatcatcctgctccccatcactgcagcaggatttaagagtctcaggaagcactgggtgcggtggctcacacctgtaatcccagcactttgggaggccaaggtgggtggatcacttgaggctgggagtttgagaccaggctgaccaacatggtgaaaccccgtctctactaaaaatacaaaaattagccagacgtggtggcacacgcctataattccagctactcgggaggctgaggcgggagaatcgcttgaacccaggaggaggagtttgcagtgagctgagatcgcgccattgcactccagcctgggcaacaagagcaaaactccatctcgggggaaaaataaagtctcagcaggcatgcttgggagatcagatgttgtaggcaggcctccgggtactttccttgaagcagagcatttgccaaatattgcagagcagcaagggtgaaaatgccctctttgccaagtgcctcatgtatgtgcctcctctgctttgtcacttggcagccaggctggcacagggcacacatggttttgtggacaaggaggagcccagtgatgatggaagtggaagtgatggtattgtagtatagcagtggccccgtttgccatgcaccaggctctgtgctgtcagctttctgaacatcctgtcattcatggcagccctgaagggtagacacttttgttaactcgttttacagatgagcaaactgagatcagagcttgaataacttgcccaaggtgacatgtccagtaagaggacgagagccatccctccttccctcagagataagccaggggagggcatgaggacaagtccatagctctgctcagaaagtctcacccaggccaggtatggtggctcatgcctgtaatcccagcactttgggaggccgaggtgggcggatcacctgaggtcaggagttcgagaccagcctggccaacatagtgaaagtccatctctactaaaaattcaaaaattagctgggcatggtggcgcacacctgtaatcccaggtactcgggactcaggagcctaaggcaggagaaccgcttgaactcgggaggcagaggttgcagtgagccgagatcactccactacactccagcctgggtgacagagcgagactccgtctcaaaaaaaaaaaaaaaaaggaaagtctcactcaggccaggcgcggtggctcacatctataatcccagcactttgggaggctgaggcgggtagattgcttgagctcaggagttcgagaccagcctgggcagcatggcgaacaggaggttcaagttggctggtgggcgcagcgtctctccttttgcttagtaagctcttggaaggtgaggctgcgggtggtgcgtccctccgttccctagcgtgttgcatagagctagatgccagcggggtcctcggtaactgtacgtggcatcggattgaacctcagtcttcctaacaggttgtggtgcctcctggagtgacaaactcctcttttcaagtgacatctcaaaatgttggacaacttactgtttatctacatggaaatcactccaatcagaccgggtaggctggcctcagggtgtgcgggcctcacgtgacaagaagggggccgtgctgggcacgtgggagtctccttcagaagcccagcctcagctcatcccggtccccaaactcctttccagcccgaggatacgctttcttgtgatccgcagcagcgccattagcatcataaaccaggtgattggctggatctactttgtggcctggtccatctccttctaccctcaggtgatcatgaattggaggcggaaaaggtaaccccctgggccgtatgtgcaggctctctcggggcccctaggagcagggcgttccagcaaggctgccgatagcgcagcctccaacgtcccctctacccttctgtctgcctaccctttccagaaagttgtcccagtgcgaaggctcggagagcctgggtcggattcccgtgctgggcgtttcatcccttgcccagctcagcccctccctgggaaagcaggaaaacagggaaaaggggctccttagtttagtggagaatgggcgggggagggagggcagtccatcgtgaatctcctctgcgctgggtccatccgaccctggaggattgcggcgtcaagtcctgtagtctcggtctttgggacgaagctgtcccaccttgacttgcaaagacacaagctgtcctgcagtcaccctggccacgtcggcctcctgggtgatggcaagcagagagccgggagggagacgctttcttccgggggcctcctgactcccctctggagccaggacttgaggggcagggagatcttgggcaggggaggaagggaggagggaagtagctcttcaagagggcagggattaggtggcatccgtggtggtagcaggagggacctaaggacagtaccctgcttgagaagggccgagtcctccttccccgtggcctgggagccctgtccctcccattccccacagtggtgccagtcctcacccctggccctgccatgcccttccacccccgccagccctcaccccctgccctgcccctccacccctcgccagtcctcgcccctggccctgccatgcccttccacccccgccagccctcaccccctgccatgcccctccacccccgccagtccttacccactgccctgcccctccaccccccaccagtcctcaccccctggggtcctcacccctgccctgcccctccacccctgccagtcctcaccccctgccctgccccaccacccctcgccagtccttaccccccaccctgccctgcccctccacccccgccagtcctcaccctctgccctgcccctccacccccgccagtcctcaccctctgccctgtccctccacccctgccagtcttcaccccctgccctgtcttgtccctccaccccctgcagtgtcattggtctgagcttcgacttcgtggctctgaacctgacgggcttcgtggcctacagtgtattcaacatcggcctcctctgggtgccctacatcaaggtacggccttgcctgccctacatctctgcccacatggcgtggtggcccggctgcccctcaccacccagcttctcccacccaccaaacaggagcagtttctcctcaaataccccaacggagtgaaccccgtgaacagcaacgacgtcttcttcagcctgcacgcggttgtcctcacgctgatcatcatcgtgcagtgctgcctgtatgaggtgagaccagccctggccccccacaggccaccccagccaacacccgccaccccacctcacctttgacagaagacacggcagagcctgggaaaggaagggtgtgtgttcattcatccaggtcctgtgctgggcatagaagacacccatgagtccaggccctcagagccccccaagtctggggtgagggactcagggagaggcagtgcctggactcaggctgagagccgtgcacagaggagcacagacagctcatggaggagtgcaaggccctgagccctgccagggaggagggaggagggcacagaagggaggagggaggagggcacagaagggaggagggcagaggaagacgcttggttgggctccaaggatgagtgaagttcctatggaggaggggaggggccagggtgggctcctggaggggtcaggtcacagaggccaaggggcatttgagagggaccctgagcaggcgggtgcagctgggcttcagggtgccaggagggggcccgcgtgcaggcggagacacctgtattcagctttgttgctggaagccatgggtgtcggcagggcagggccccaccaaggctgggtccggggacccctgatatgacagctttgctttcccttctctcagggagttcccttcacactgtaaggccagctgggggctgtctggccccacccgtatgaaccttctaggctttcttagcttttggtgtgaagcgagagtgaaggtggcccacattgggcccgtgttcagggaaaggcaaggcgaggggacagattcctgagatcctcaggctgctgccgggtcgtgggacgagtcagtacctggctgggagaggcaccaggccaccagagttccgaccccacgtctccaagtgagtgctgagaggcgcccagttctgccaagtaggaacaaagcagacagagcttgagagtccaagcagcctgaacaggaggccctggcgatgagaaggtgtggttggtgctggggatgtccagcaccagcccaggtgtgatgctttctgtggtccacatgttcccctgccacaaccccagtgcagcccccaccttgcaggggctccttcaaggccagggtccagcctccgtgcccctctctaagcccgccctatccggggccgtccttgctcagccccggcgtggcctctgtgtgggtccacatctctgccctcctctcgcccccagcgcggtggccagcgcgtgtcctggcctgccatcggcttcctggtgctcgcgtggctcttcgcatttgtcaccatgatcgtggctgcagtgggagtgaccacgtggctgcagtttctcttctgcttctcctacatcaagctcgcagtcacgctggtcaagtattttccacaggtacctccagggccctgttcacatggccggtggcaggagaggtgagagctacatggcccaggccctgctccggtggggcagctcctgccggcgtgaggaaacaggacggaaagccacagggagcccgggagcccagcgggagcggggcggtggggaggccagcctgccgctcttcccccggggctggaatcacaggagatcgctagcggaggccccttggaccccacgctcccctaagcatcaggtgtgcgggtggttccccttctccacaccccagcctttcctgatgcctttggctctgccctcaccactgcctccatttccacagcaggacactctggagaggtgaggtgggaggagggagccccttcccgcgcagagctcagcccgtcctatgagcatagccggtcctcttcagatccggggactcagggtccagcacatcttgccccacagcctgggacagggtcagggctgaagttgctgcacccggggacctagggcctcatttaactcaccccattcccaaagggagaagccttgttccagtgcccccagccctgggagcctcgtgttctgtgagctcaggagggccagcgttctgactgggaggcaggactggactcttaggctgagcaggactaagttctgtggccaaggagcccgggcgttccgggccaggccagcctgcacagaggctggggcgggacacggggcggcagtgaggggatgtggctggttgaacagtgttgagcatgttgaagctgggaagctggggtcaggtcccgggagctggggggggcttccgaggaggggaaggtttggggaagtgggccccagtccctgagggtgggagggattggggccaagaaaccggggatggaggagcccaggttggagacgtttggaactgctggaggggcagcagcaagtacggaagagggtgagccgggacacagacagggactgactagaggctcactgggaggccaccagagaggccaggacctgcctcacggggggaaggaaaggtcacagcagtcagaggacccacagggctctgcagcatgggaggacgtggggcacaggcagtcagactggggcgcatccccgcagacccgcccccccaaccagacccaggaagccccggccaggcctgtggggggcgttaaccccgctctacagacggggaaaccaaggctaggagaactgtcacttgcccaagacagcaggctccggtgatggagccaggattccaaaccagaagtcccactcccaccagtccctaagcacatgaagtccaggctgagtttggggacagccttgcctggaggtgagaagaagaatcatagctacagggaaactagcacagggccttggccccagggatgtggaggagacggggaaggccgcatcggccccgcctctgctggagctgtgaggtgtggggggtgcggggcctttgcttgctgtacatgcagatgagacgcctacccccaggaccacccaaactgttccttggctgaggcctgtcatagcccaaaggtcaccgtgtccttggagccaaggccccagtgggaggaatgagaaccgcttttgtttggaggggcagtcacgaggcgcatgaggcagccgcccagccctcaccgccctccgtctgtctgtccgtctgtctggcccaggcctacatgaacttttactacaaaagcactgagggctggagcattggcaacgtgctcctggacttcaccgggggcagcttcagcctcctgcagatgttcctccagtcctacaacaacggtgagtcagccagcgggctgctggccaccctgcggctggggcatcgggcggggccagccttcccgggaccttccagccagggctccacccccacctgggatccaagccaatccagcccccaaggagagacccacctaggggccttcgtagctggaggctttgtggttttctgggacccccaccgcccaccaccccacaagctccagctgcctcaggagctgccaacctaacaccagcttctgtcccccggctgctaacagaccagtggacgctgatcttcggagacccaaccaagtttggactcggggtcttctccatcgtcttcgacgtcgtcttcttcatccagcacttctgtttgtacagaaagagaccggggtatgaccagctgaactagcacccagggacccagtgtacccagcctctggcctcgtgccctgctggggaaggcctcacccagcgaaggccggagaagcggttgggccctggcacacagggctggctcagtgtgcggacagaggagaccactctgctcctggggccagaggccattcaatagcctgccttcgtccgggcccctcctgggcctccccggccaggcacgtggcaccgtcgccttgacaccgccatctcttttctttaaggcttcaggcagcgcgcacaggctctggcagccgtctcaggcaggactgggcaccaagcttgcagccgaaggccttgccccaaactaccagcgtttctgcaagcagcttgaagggctgaccttgcagccgggtgagccaagggcactttgctgccaccgctgcattcccagagatcaagcagcccggtgccgtggccagtgaactcagaggtgctggtggacgggctaggactttggggttaggccatggggctctttctctgaaggccactttcctgacgtactctctgtacataactcagcgtccgtgactgcagtaacagccagccctacccagagtatttctgagccatgaggggcccaccagattggttctgaattggattcatgcccagcgcattagcatagtaactcctttcagattttttggagggacgtttggaagtggcttactctcttctgccctctctcctacctccaccttctcagattagccccatctgagcacatccagctgctccttacccagcatctggagtacaggacatagctctctcctgctaccagtctgtgccttagaggtctgttaggcctgccaaacggcgaccagctcccctggagcgagggcaggccccttccctctctttccccagacacctacttgagactcaccaatttctggcctgttcaggagcctcagataagtatttgtacttgagaccacctcacacaatctgtatgggcccaaccctgatctcaaacctccttccctctgcccaaagctgtccttcctatggcaggaggggtgggggtcccaggacgtgcctcatacatgacttgagcttgtcagtccactgagtttccttctacgagatcaacgcgaggggcctgtatcttgaattaaaacctactcgcttcctttctgcactctgtgtgctcgatacagaaggcaggtgtgctggccttcagagccaggtgccctgctcccctcgtgtaaggaagcgcataaggttgtgaaggtcactgacccgagagcgctgcgtgctgaccccacacttcactggggagccctcttgggtagcgcgagacgcctacccgcccagggccaggtcagtctcccaggctccgtgtcttcacggttaccagggcacgccactcaatctggatgtgagccggggtggatgaggttctgaagggcacaccagcactgggagcgggggcagtgggggtcttattctccagacgcttcctctatctagttgtaacaaacgtcaaagaatgtcaggtcttgtttctgcagagcagactttggcctgacggggtccacagacctgtttcacttgcaacacccagtaaatgtgttactgggtgccctactttaaaaatcagagatttcaaatgattgacttttccggctgagtgcggtggctcacgcctgtaatcccagcactttgggaggccaaggcagatggatcacctgacatcaggagttcgagaccagcctagccaacattgcaaaaccccatctctactaaagatacaaaaattagctgggcatggtggcgggcacctgtaatcccagctacttggttggctgaggcaggagaattacttgaacccaggaggcggaggttgcagtgagcgaagatcacgccattgcactccagcctgggcaacaagaacgaaactccatctcaaaaaaaaaaaaaaattattgacttttctttaaaatctgatttggcagtgctaggtaggtccaggagtgctaacaccttcccagaggtggtacgcaggtagtcaggtgctctctgactcacccccatctggccagatcacggcccccagcaacacgtggggttgtgtccctcgctgggatacacggagtgcccttataggcagggagtcttataggcaggggtctctcccaggcacctctgggtgtccctacggcccctcccaggtgggagctgaggctaggttgcaaaaaggaggttgggagcaagtaggggcttcacagtaacacccaagaaagcacacgcaccccagggtcccaccccagtgctcccagacactcccacagatgtggttctggtcaggcgcagtgcagctgctgcggctccaccagccccgggctttcaggcaggtgggcctgggagtagttgagctttgtcccagaacagtgggggatggggccatcattaaaaccacagctctggccccaatatcccaccgccacccccaccccgatatcccagcccatgcctcagcaaagccccctgtgaattccagcatttttattgagcgcaccacatcggggaggggcggcagtggtttccacggtaaccaaagtaaggcttgtgcacttgctgagcttccagatgcgaattagtaaaagctaaattcaaaagtagaatgggcatctccaaagagtacgataaaaacattttgtatcaaacttgtgattaaaaaaatacaaaagttaaacccacaggcaaagaggaaaatgacaatcctgagagctgccctgataggtgagcctcgaacctcgtctaaatccgtaagaaggcaaaccctggggaggccagcacccctcgggagagtgggagtgaacgcggagcccacctggcttcatctgggcaaagcttcgtagcgcctctggcaggatgtgtgtccagtcccccgaggggcagaggcactgcggtgtggacacacgagggctggggggcaggggcggagccgaaccctgcagccaggcaaaagcgggaaaggcctggttcctccagcatttcccagcttttgggggctcccaagagatagtggttcccacttgcccagccactgctgtggccaagcagcagggtcggacctgagcctgtggtcacagcagactggctactactcagctccaggcccttatttccaatcctcggtgtccaggagagaaagccggtcccagaggccccaggccagggatgggagaagggaaggaaggccaggccaggcctctgggaccagctatagcccttctgagctggggcccagcggtcagcagaagccagatggggacagagtgtggaagtggcgttactgtacagagaggcggcaggcaggagtcgcagatggtggtggctgctaggacagcatggactgctgcacggccttctgcagcgactgccgcgtcaccagcagacgcaccacctcctccgagcgcttggtgagccgcttgcgggcctggtcgtgtgtgaccatggtcatgtcccagccgttcacctggccccaggagagaacacaggctcacctcagctccccgccctctgggatctggaagcagagggctttgggggcccaggtcattcaagtaggcccccagcctaacatcccagggctgggagacaccaagcactgtggctgagacacacaggagagaaagccagcgtcctctggggcaatgccagtatgggttcccaattggctgcagtgagtctctcccagctgggaggctggggcagctccccacccccaagtgcttcagacctgcttgcccaaaccttgtttctcctcctttgggacacctgttacctgcatgatcttgtctccaatctgcagcccagcgatttcagcagggcctccttcagacacccgtgtgacataaataccctggaaaggggcagcccaagtcaagccctgtggtcactggactggccccttatcacacagcggaagccagcatggcacattctcagccgtccctctgtccctgcacccagcctctcccagcacatatggtcagtgaggactgttctgagagagccggggcagagttgctgcaccaccatgcaccggccctgctgatggccgcctcctgctcctcctgggctctgtctgagcagcccttcctcaccccacccgtccttattctcactaggtcacttccgatgccttcttagagagcatggtttgagagatgaagtctgttccttccatgcaggcccaggaagcagagacccaccatctcaggcccctgtgccccatggagcggtcccaggaccccagaccccctcaccttgtccgtcttgtcttcagagaagggattctgggaaggatcctggtcgattccacctccaatgctgaaacccaggattaagttctcaccttgacgcagcttgtgaatttcaactctttgctggcaaagaaaaaagccagttgagagaagtgggtggttggagaattaggctggtgggtgttcccagcagcagcctcagagccatgacaaggggctgggtcccaggcccctgcaggaatccagctgctcaccagcctgggaggctgaggagctggcactcagaacttggccacattgatccacccacacagccctgtgtcctcaacctgtccccacttcccctgttagtcttaggcactagtcttggtcaacatgtggtggaagcccctgctggcccaagagtccaggtgctgtggcttctgtaggtgggaagcccgtctcacaggaggtgctctggaaaagcagagatcaaacttgcatagaaaggagaggaaggggtttcctttcggccggaaccgccatcttccagtaattcgccaaaatgacgaacacaaagggaaagaggagaggcaccggatatatgttctctaggccttttagaaaacatggagatgttcctttggccacatatatgcgaatctataagaaaggtgatactgtagacatcaagggaatgggtactgttcaaaaaggaatgccccacaagggttaccatggcaaaactggaagagtctacaatgttccccagcatgctgttggcattgttgtaaacaaacaagttaagggcaagattcttgccaagagaattaatgtgcgtattgagcacataaagcactctaagagccgagatagcttcctggaacgcgtgaaggaaaatgatcagaaaaagaaagaagccaaagagaaaggtacctgggttcaactaaagcaccagcctgctccacccagggaagcacactttgtgagaaccaacgggaaggcgcctgagctgctggaacctattccctatgaattcatggcataataggtgttaaacaaaaaaaaataaaggatctctgggctccaaaaaaaaaaaaaaaaaaaaaaagaaaggagaggaagggcttgccggccacggggaccagcgcacagggtgccgtggatacgtgttcgtgagactggagtgtccagtgcaggacacagaactgggaggcgagatgaggctgaaagtgtaaggctggggccagatcccgtcctggaaggggagcaggggtgtctccctaagccccagaccctgctcttgtgcagaaacgagtgttctggggcattcccaccatgctctggggtgttcccaccatgctctggggctatggtccccaactgtgccaggttcttttcaaagcccttggcaagcgccgtccagtcagcagatgctgggagccagaccagatcactcccaaagtcaagttttaacaggaaggagaaaagaaaaaagcagaagaccacaatctagactagacctaaagaagtttcccaaagggaggattatttgcaccaggctttgagggggtgatgggtagcctgaccttgatcctgaacccactggagttctcaggaacggagtagggtagggcatggtcaggtttgctgctagaatgaccactcaggtaatcagtagaggaacggacatctcacaaaagcaaggtgcagaggccgggggacatggagctacctgaaaatggagatctacagacttagggaccactcatggaggagaggagtcaagaggagcacccagccaccgtgcctggctgaacacacattattcagatggggacccaggaggaggaggagcaggttaggttggagtgccaggagctgcggggcaggtgtccagaaggcagatggatctatggagccagggttcagaagaatggcctaaatgtctttaatattctcaggattctacatgggagagggtggggactggggagtgagcctgcccaaacccatccccaatccaagactcgagggagaggccagaccatacacaccatgtccaggcacgttcctggtgttaccagaattagggggcatgggcctgcagttttggggaaggccctgggaccagttatggcgtgagggaggggggcaggaagcatgaggcctactgtgcctgggtcctcatgccccaaactgagctcctccaggcctgctctgccggcacggtcagaagattacaggcccttgggttgggagacagggctgtcactgatttgctgggtgaggtcacgcagaaggtggcttgctgtagctcctcacctgtccctgccccccttctacctaaagagcaaacctggtgccttctctctggggcaggtagggatctaaaaaagccaggctgggccgggtgtggtgcctcacgcctgtaatcccagcactttgggaggctgaggcaggtggatcaccagaggtcaggagttcaagacaagcctggccaacatggtgaaaccccgttctactaaaaatacaaaaattagctgggcatgctggtgcatgcctgtaatcccagctactcgggaggctgaggcaggagaatcgcttgaacccaggaggcggaggttgcaatgaaccgagatcgcgccactgtactccagcctgggcgacagagcaagactgtctcaaaaaaaaaaaaaaaaaaaaagtcaagctggtgcagggagggtgaagcttaggacagctgtcagctggtccagcaatgtttcctcctggcccaggcctgagccagtgctctaagctcagcctcacttgtcgcctttatcagtggcttctctgcctccacccacctgattgctggagcttctccagcacacccaactgagataacacacccagtccctatggctccagggcggggactttcgcttgacctactgcccaccgggcaggcatttcttctcattctctgaacgctgtcgggaggtaggcaggagacctgagtctttcctgaggtggtcttttctggctgagcacttctctctgggactccccacctctgtcatagggttgtgtccctctgtgacaccggcgtctgagtctaacgtcccagccttccttcctccctctgcctagtctaatagcacccagcacctaaaacaagccagagggcggccaggggcctaggctagcccccggagggtctactcaggactcaagtgccaggagggaggcctggacttttttgccttaagggctggagacccaggaaaagttcgaagaggaaacgctcatcgcagctatacgagcgtccaccctggaccaggcggcgagtgggttggaggagcaaggctggacaggaagggggcaggggctgccacggcaggctcgggagagccccacccccagatctccctccgggcggcggcgcaggctgcagcggaggaagcatttcctcattccagaggctgcgactcatggacgtcgggatcggcgcccgcccccagcagctccccgtctggggacacggaggcccgggaagggggcgcttttccaggctcctgcagccaggcctttccccgtggccctccccgccctgcgcacgcagtctgggctctgtccagggtctcgggaggctctcgggtcccggccatccctgtttcgtggctgggggaactgcggcccgctccggcaaagcggggacccgagcccttgccgccggttcgcaggagccccgggttcgatgctctgtcaacctgcttggggtgtccgtttcccgctctgcgaggtggggtcaggccaagacgaggaggagcccgcgcaagcgcactcaccaccacggcggtgaccggctggcccgggatgtaggacatctcgaccctgctctggtcgcccagcgccgctccgagaagccggcagcagagtacccgcggtcgcgccctcgctgcttaacaaaggccgccccgctcggcccgccccctcatgaatagttaacaaacctccagccaatcactggccggagcgccactccgctttcggaagtccctgcgcgtgcgcagaaaagcgggcagagggcggagcgtgtccggggcgcccacggcgcaggcgcggagggcggggcgggatctgggcgcgtgcgcagcccgagacctcccggcagtcttccgagcaagatggcgccgcgggcatttcttccactgcccgtctgagggaacgctaagtagtgtgtccggcgccgtgttccaggtaactgggccaccgtggccggggaacgcagacgcgccaccacctcccggccggcccggaccctcaatctcctcggcgtctttggaagatccgaggcccaggactggtgccaggtctcggaagctccagggggagggggcggcgtgaacccaactcaccgagctccgggcgccacttgtaacttggttttctccgcagctccgcgttgttccgcgagaaagcgagaggccgagcccgggctggtgcgatggccgcggtggtggccaagcgggaagggccgccgttcatcagcgaggcggccgtgcggggcaacgccgccgtcctggattattgccggacctcggtgtcagcgctgtcgggggccacggccggcatcctcggcctcaccggcctctacggcttcatcttctacctgctcgcctccgtcctgctctccctgctcctcattctcaaggcgggaaggaggtggaacaaatatttcaaatcacggagacctctctttacaggaggcctcatcgggggcctcttcacctacgtcctgttctggacgttcctctacggcatggtgcacgtctactgaaatgggggcccgggggacttttttaaaaaaccagatcgggaggactgtggccagcaattaacaccatgtagacttccttagttcttaagtggttgaattcgctgcttgttctgtaacgttataaataatttatatctgaagacggagagcctgtaatattcttcagattaaatgaagcgtgagacactttgtggagttctttcctgctgtaacgcttaggctgccactgatgcaaaatcgccgagatttgactcctggagagcaaggaatgggccatagccttgtgttaagtccttgtatttacacataggccattcagaaacgggccctaagggcctacataaggaaagaacttattaacatcctaagaagcagtaacagttaatatgtattaagagctccctgggccgggcacggtggctcatgtctgtaatcccagcactttgggaggccgaggtgggcggatcacctgaggtcaggagttcaagaccaacctggccaacatggcaaaactccgtctctactaaaaatataaatattagccgggtgtggtggcgcgcgcctgcaatgccaggtactcgggaggctgaggaaagagaatcgcttgaaccctggaggcagaggttgcagcgagccgagatcgtgccactgcattccagcctgggtgatggagcaagactccgtctgtctctcagggaaaaaaaaaaaaaaaagagttccctatatgctggcattgtgacttctactctacaccgatcctctcatttaattttagcaataaccttacagggtagatgttattgttagctccctcgtaaggaacctgaggctcagagaggttaaatacttctcccagaggagatacagctaggaagagacagagccaggattcaaatgcaggtctcttaatttgctcttgatatgtttgctgggtgtacctttcacaggccagcgttccctcccactaaccactactttcaggtatatatggtgtcattttagttccatttcatttagtgacagtcctttccataagaaaaaataaagtcaagctgtattttttagaatatgtctagggaagattaaacattgtttggacatttaggctgggcacagtggctcacgcctgtaatcctagcactttgggagtccgacggcaggcagatcacctgaggtcaggagtttgagacaagcctggccaacatggcgaaaccccatctctactaaaaataagatgcaaaaattagccaggcgtggtggtgggcacctgtaatcccagctacttgggtggctgaggtaggagaatcgcttgaaccctggaggtggaggttgcagtgagccaagatcataccactgcactccagcctgggtgacagcaagattccatctcaaaaaaaacacaaaaattgtttggacattgaagttgaactttgggcaggtttagggtgtaaacacctccatgtgttaatccatgatcctttcttgtcaggagggttattttagaataaaacgcatttgtggccgagcacggtggctcatgcctgtaatcccagcactttgggaggccgaggtgggcagatcacctgaggtcaggagttcgagaccagcctgaccaacatggagaaaccccatctctactaaaaatacaaaattagccgggtgtggtggcacaggcctgtaatcccagctactaggaaggctgaggcaggagaatctcttgaacctgggaggcagaggttgcggtgagccgagatcatgccattgcactccggcctgggcaacaagagcgaaactccctctcaaaaaaaaaagaataaaatgcatttgtttaattgaggaataaatattgcattagaatgacggtaattgcctgagtgtagtggctcctgctgtgatctcagcactttgggaggccaaggcttgagcccaggagatcaagaccagcctgggcaacatagtgagatgcccatctctacaaaaaaacatttaattagccagatgtggtggcatgtgcctgtagtcccagctactcaggaggctgaggtgggaggatcaggatcacctgggcccgggaggttgaggccacagtaagccacgattttgccactacactccaacctaggcaacagcgagaccctgtctaaaaaaaaaagaaattacagtaatgaaaatgatggtgctcattggatttatggttaactggggaaaccagcatcacctaacttcagaaatacttaaatcatggtgagtactatgaagaggacatagcagacctagcccaagttggggtatatggaggtcaaggaagtcttctctgaggaaataacattacatctgaaacccaaaagttgaataacataggcaagtgtggggaaggagttaccttcaggaaagcgcatgtttccaggccattgggcaggaaggaatgtgactgtatttagagagtgagagaagaggccacagggtagacccagaccagatcatggagggcagtaatgggtgtggggacatgcgcctgtagtccagctactcaggaggctggaatgggaagatcaagatcacttgagcccaggaggttgaggctgcagtgagctcccatttgccctggccttgatcctcagagcaaatgggggaagcctttggaagtttttagtctgaagtgacgtaatcacatttggattttttttaaaaaaagaatctgttttagattggaaggggatctgagagcttgaatccaagtccccttttgacagatcatagatagcccatggccagtcatggaaatggatctgggacccagacctgttaaattccgtttcggcttcaggaacacatgcacacgacgccaaggagaagctgaggccatagcgttgccccccatctcagtgagccctttctctgcccccactgaagatcctcagtggtttgcccacctcagtcctctcagaacctcctctgagtgggaaggaaaggttcattcctggtgtaagggagaagcagagggagtcctcagcctggtgggagaggagaaaaaaggaagagggataagcgagctgatgtacttaaccatttccctattgttgggcagtaagtttgaaatgttcactactataaaaaatactgcaatgaatgtctgcgtttatattgttttgagaaaattaataagttcctacagcagaggataaaaatttggttccaagttacttccagagttgtgttagattacactacttgaatgaaaagtaccagttttatcagttccttcctagtctataattttaatagttgctcatttaaagcatttccataatttgaatttctttgcaagatgaggaatatattgcttactaattgtttcttgtgtctgcctcttttgatcttgccttcttacattttcctttaaaatacgggtaaaaatgggccaggtgcggtggctgttgcctgtaatcccagtactttgggaggctgaggtgggcggatcacaaggtcaggagttcaagaccagcctgaccaacatggtgaaaccccgtctctactaaaaatacaaaaaaaattagccgtgcatggtggtgcacgcctgtaatccccgctactcaggaggctgaggcagaagaatcacttgagcctgggaggcagaagctgcaatgagccgaggtcgtgccactgcactccagcctgggctacagagcgagactccatctcaaaaaaaaagatgggtaaacatgaagagaaaaaaatcaggacacgtttgaaattgacaccatttattgttttatgaccaaataagagtgtcagagaatacatatcttgggcaggtcccagaaagcgtctgccatctcccccactttaattctgtgtactggcctaagggcaaacagctggcaggaaggtggtgtctttaggagagagagtacttggatccactggagagtatgctctgagggaagctgcggcacttgcagaggggagtgggctggaaccaaatggagcccttttccggacacgcacaatgctattcccagtgaggtaatctaggaactctacagggcactgcggtccttagctgaggtgctcaaggactccggaaggaagtcatgttccccatttacaacccgttccctagtgcgggaagccagccacggagaaaggaagaactgacggcagggggtggggcaaaaagacagccatgatgggtccgtcctgatgaccccagcatcagacgtggaggtcactttgctctgtgatggctggtccctgtgatgtggcattgatagcacccaatgtacaaatttcccgttgggcagcatcctgggattcccaaaggcatgggatcactgggtgctagacggctgggtttaggacagggcctgaacgtaagcagaggcaattcacgtgctcctggaatatcagaacagaaaggagctcttgagaggctggcactctcatcttcccagtgaggcaaccagtgcccagggagaagggccttcccaagtctgaaaagagctacagttcatgcttcacttctccccatttaaaagccagtttccggccaggcgcggtggctcatgcccatgcctgtaatcgcagcactttgggaggccgaggtgggcggatcacgaggtcaggagatcgagaccatcctgattaacacagtgaaaccccgtctctactaaaaatacaaaaaattagccgggcgaggcgagcgcctgtagtcccagctactcgggaggctcaggcaggggaatggcgtgaacccgggaggcggagcttgcagtgagccgagatcgcgccacggcactcccatccagcctgggcgataaagcgagactccgtctcaaaaaattaaaaaaaaaaaatacaaaaaaaaaagccagtttccatcagagtaatgagctcccactcttgcaccaagattatgcagaaaaatggtgggagctgggggctgtgcaaaaagcaaggaaactggaagagtgtgacactgtctggaagctgtcaggcgatccctggctcttctgagcacggggcccctgatgggcagtcaagaggtcactggaaggcttggccggccttgaagaaacaatgaggttaaatcctctaaggaagcaaagtctaaaggggcaaccttgcagctaaagaccgtcaacttcattaaacaaaagcctcaccaaacctggctcctgtctgccgccttcacccaggttctccgttgctccttcccatatcaaagcgtctcttcacacctgtgcttctcttacctggaatgcttccccctcacctagttaggctgctataacctttcagatttcaactcataggtcacttccttggggaaaccttctctggctactactcgctgacctctccgacaccccattccgtctgtgatgacgggtgtgatcatttggtaagggttcaatgccccattagactggaaaccctcgggggcagggatcgtgtctgtgttgctcatctctgtctcagcagcatctggtccaacacctgacatgtcacagggactccataaatatttcctggctgaaggaatgactaactgtaggaagacattttcctttttctagagacggagtctcgctccgtcgcccaggctggagtgcagtggcacgatcttggatcactgcaacctccgtctcccgggttcaagcaattctcctgcctcagcctcctgagtagctgggactacaagtgcacgccgccacgcccagctatttttttgtattttagtagagacagggtttcaccatgttgcccaggctgttctcaaactcctgaactcaggcaatctgcccgcctcggcctcccaaagtgctaggattacaggcgtgagccaccgtgcccggctaggaagacatttttgttgcaatatgaaacaaatagtatgactatcctcaggttctgtggcttctgccagccatttcgaagtctggttaaaatcagcagccatgacccctgccttttttgcttcctcccaaacctaaaagtcaccaagttataaaaatgcaaggctttgcgtcagtgaagaagtgacacacctaagtggatcacctggatcttcactttctttttttttttttgagactgagtctcactgtcgcccaggccagagtgcagtggtatgatctcagctcactgcaacctctgcctcccaggttcaagcgattctcctgcctccgcctcccgagtagctgggactacaggcatgtggacaccatgcccggctaatttttgtatttttagtagagatggggttttgccatattggccaggctggtctcgaactcctgacctcgtgatccacccgcctcggcctcccaaagtgctgggattacaggtgtgagccactgcgcccagcctggatctttactttctaatcagagagcagtataggcttgttgcaggttcccttcccagaaaacccaaagcgaggaagttgctttgctctaggagggttcctgttctggagaccatgtccctgggcccctgacatccctctccaaagcctcagtggagggatgctctcaccacccccgcctttctgtgtgcagagagaacccctccaaagaggatgcttccagggagccgcccagacagcactgggactggttgagtgagggcggcgctggagcacttttctgccaggtggctcgggcaatggcgagggctgagctccaggtttctcaccttgggtttacggggagacaactcacatacaacggggtaggagaagagagctagtcagctcccaagcccaacatcgaaacgtacttcatgtccatttttgacaggggagactgggtcttaagcgccagcgtcaggagaagttcattacctgagtgaatgtgtaagaaaccacacgagttttcggcaaaatcagggagcctcctgcattagtaacactggctgcctctggggaaccgggaggacggaggttgcttttcactgactatcctttgcaccttctaaactttgaatcatgtaagtattacccagtcaaaatattgtaacttaaatcagctgagcatactgctgctttcagggtgggggaggaagcctcttggtctctaggcagcatgcgtgtaagtctgacctagaaattggctccatccaccaaagctggcctttttcccctgagaaccagggcttcttaaatgtcactgtgcacacagatcaccttggaatcttgttgaaacacaggttctgatttgggtggggggcgggggagctgggacctgcatttctagcaggctccggtccctggaccccactttaaatagcaaggcttggccgggtttggtggctcacgcatgtaatcccagcactttgggaggccaaggctggcggatcacctgaagtcaggagttggagaccagcctggccaacatggtgaaaccccatctctgctaaaactacaaaaattagccgggcatggtggtgggcacctgtaatcccagctacttaggaggctgagacaggagaatcgattgaacctgggaggcggaggttccagtaagccaagatcacgccactgcactccagcctgggtgacagagcgagactctatttcaaaaaaataaataaataaaaagcaaggccctacagcgatggaggcagagagcagctgagggtgcggtaggtgggtgtggccgtggcataagacaggtggggacggagggaggggaatgagggcctccctaactcagcccgtttacacctgctgagtggcgccatccttgatctcattagcacttcaggcccagcctctgaggaggggtggggagggcaggagctcggcagggtcaaggcgactgtatctcccatctgggcaggtccatattccccgggcgtcccgaggctggtggagtcagatggagcagaggcctcttgcctccccttccccatcttacctagactccccaggagctggcttccccactaagagccagctgcctcctgactgctccagtcctttcctggttgcctccatggccacctttaaattttatccttggggcaagcccaaatgtccccttgggtgttgtccaagagctttctctgagcaaccatcattctcggcagggatttcggaaaccctgctagaggctagaggaaggccagctggagtggctgggcctggctgtgatgtctctgttggctttggaggaattacacgcgggcccctctccctgaggttaggtcagcatctcatttaagcacctcttggtgggcccagcacacagcatgcgtcaatacatgtttacagctcatatgaatgagtgaaggtgcagccaggttgagggaaaatccaaacactccacttccgctcagcaccctggcctgtccctttccctggacacctgctccagggactcctcttctaggtccgagcccctctgaccattgggaggctcccctcctcactcagcaaaaagcttgcagcaagatcccaaagttcaggagagatggctgtgcctggaagcccctgtctcatgcaggcacagactcctctacccagttcagagctgcgggttgttctggccccaaagttttcagcgacactgctggtagccagcagccctggctacatctccactgtctgcagctgctccaaattcacctgtgcattctgcaaatggccagacctgtgtgtgggcgggagggggcgcacagggcagagaggactgtcgggagccggtgggtgggccagcctcaccagaggcagcaacgctcctggcagcactgcaggcaggcagagcattcagagagagcacagcctgccagggttcctgcggaagcccagcacgcatagatgctcaggcagaagcctctggagttgccccggcaaggagtagcagcaattgcggtggcagctggagcgtgggcctgtgagtccacagcctcccacaagcctcagcgaggctcagccaagacaagccaggccgtcgggcttcccgcttgctcagaatgggagctcaagtgagcacccaggaagtaagagtcagctcagggagcacaggagggctgccaggctctgggtctaccccatacggacccctagcctccagcctccttgccccactgctgcagcccctgcctctctctctcctcactcttctccagcccagtctatttcttgctccttccctgcccaggcccagctcccagctgaacgctgccaattcctgagtcagcaaggaatgaaagctgggccaggagaaaggccaccaaggtcagtgagtacctggggtgtggtttgcaagagagtcacagaaccccagtctgacagcaggaggtgtccagcccccactgggaggggaaaaaagggaaaacaaggcacagaaagggccaggcacctgctcaccgcacaggtactctgcaaggcagacgcagagcaggcccgagacaggtcccccacccagccagacgccctccccacgcaggctgagcctcgtctgcagagaagccagcgcccccaggaatcgcggcccaaggacccccctggcagcacggccagcaccctcctgaggccggggcagccccagaatcgcacacagaagaggggctgagggggggtcatctgagcacagagacgttcggcaaaggcagagtaactcaggagaacctcatcctacagacactgccgggattcaaatctcagcgctgccattcaccggctgtgtgacttgagcaaattaccgagcctttctgtgcctcagcttcctcatttgtaaaatggggaagatcggtgtctatctgattcagttgcttacatgagttaacaaatacggagagtacagaggggttccaggcagagagtcagtgctgtggagcagcgcgctgttatcatctgagcgccggcatggcacagcaggcacccatggccatccagggtctcgggagctaagggggaccttgcggggtaaagcaccagccccttcccacagaggctctcccagttcctagatgtcctgccttgtggccagctcacaccagagcagaggggtccgctggagctgccaggcatgagaagccccaactggggacccctctctgcaggacccagctgtcgggctctctgcctagcagtggcctcacctgtggggctccaggagctgtgggcacacagatccgttccccttctgactgctgcttccacgcttcgcctcgggtggctcctgcagctcctgctgctccggcatccccagcagccctggcccagatgtgagctgctcagatagccccagccccgatgcctcgtcctcggcctcctgggaactgtcttctaggcccctggacaagatacaagctgttcacctgggacggccctgcagggtgcctcccctcctagacgggcggagtgggccttgaagaatccctcgccctgcaggccgccaccctgcttcctccagccggtgtcctccaccctgcttcctccatgcggctccctccaccctgcatcctccaccctgctctctccaccctgagtcctccaccctgcttcctccacgtggcgtcctccaccctgagtcctccacccagctccctccaccctacatcctccaccctgcatcctccacctggcttcctccatcctacgtcctccacccagcgtcctccaccctgcatcctccaccctgcatcctccaccctgagtcctccatccggtgtcctccaccctgcatcctccaccctgcgtcctccaccctgcatcctccaccctgcatcctccaccctgcgtcctccacccagcgtcctccaccctgcatcctccacccagtgtcctccaccctgcatcctccacccagtgtcctccaccctgcatcctccaccctgcatcctccaccctgcgtcctccacccagtgtcctccaccctgcgtcctccaccctgcatcctccaccctgcatcctccacccagcgtcctccaccctgcatcctccaccctgcatcctccaccctgagtcctccacccagtgtcctccaccctgcatcctccacccagtgtcctccaccctgcatcctccaccctgcgtcctccacccagcgtcctccacccggcgtcctccaccctgcttcctccacccggcttcctctaccctgcttcctccatcctgggtcctccaccctgcaggccaccaccctgcttcctccatcctgggtcctccaccctgcaggccaccaccctgcttcctccatcctgggtcctccaccctgcatcctccaccctgcatcctccaccctgcgtcctccacccagcgtcctccaccctgcatcctccacccagtgtcctccaccctgcatcctccaccctgcatcctccaccctgcatcctccacccagcgtcctccaccctgcatcctccaccctgagtcctccacccagtgtcctccaccctgcatcctccacccagcgtcctccaccctgcatcctccaccctgcatcctccaccctgcgtcctccacccagcgtcctccaccctgcatcctccacccagtgtcctccaccctgcatcctccaccctgcatcctccaccctgcgtcctccacccagcgtcctccaccctgcatcctccacccagcgtcctccacccggcttcctctaccctgcttccttcagcagcacagtcaggactgtggttggggttcagcctgtggccagggtcagggcgcacggctataacccagggctggggttcaggccatagctggagtgcagtaaggcgaatgacccaggcagaccctgcacccactgtcccaggctgtgggggtgctgagggagtactaaggtgtctgtcccaattcccattctgatccctgcttctccagaaggccttccccaaaggccgaagccacagccccttccccttcccgccctcccacagtcatcagggttccccacccacgctgtgctctgccgctgtgaacacgcacaccccaccgaacccagggcccaggaaactccggaaacagcctctgcatggaagaaaatatccgcttttctttcctttactactccagcttccctcagccccggcgcaccaggaccaccaagtccaagaatcccaaaacagaagtgctgcagacaccactcgattggtaaaccaactctctcatctcccagatagagaaaccgaggcccggggaggcctgggacttgtccagaatcaggcggagcctgtgaactccgtctcccgccctgtggcccacagcgccctctcctcccactgctgccgaggccgaatccggttctgtagagcatgtactcagaacacttctcctccccgggccctccagcccctgcctcccaccccagccatcaatatcacatcagggcaaaggctcgaagccacgggggtgctccacagggctgccctcgggccgccggcctggaagcggaactgacctcacttcctcgtacttcttgtcacggtaaaactctctctttttgatgaggtagatgagtaccaggtcgcagaagaaagcaccctgcaaaacaggggttcctgattcagaatcctagacctctgagagcactgttcatttagggcactttgccccttccatcctgcaacagcccctaaaggtggcatcactgtccccatttaacagatgaggaaactgggctcagcaaggggcacccttgtccgacaccacagagctggtccatggtggagctcaagctggactggagctcccccgatcccacaggccaggcactccccgaccccgcaccacccggaccccatccaatcgttccttcaacacatttgctgggcacccagcacgtgccagtgtctgcaccgaagtacggagaggatctggacaagagagacctcctggggactctccctctggtgcaggagacaggcgtgtcgatgacgacccacataggacttcactcagcctggggagggtccctattcagtccttaaggactaaagaggagtttatacaagacaaagaggtggaaggacattacggagggaggaacaagcctgtcacatctgggaaatgccgcagggcctgtgcgggaagagggagatgcgcttctggagaaggggatggggactggcctgttaggcttcttagaatgtttccgaggcattggtcctcatcctttaggtgaggcggaggcaccacagcccgaattttggcatttagaaagatccctgtggtagtcagtgtgagataggttggaagggttctaaccaacaaggacgctatggtgctagtcaaagaaagatgatgggtgccaggtgcagtggctcacgcctgtaatcccagcactttgggaagccgagtcaggcggatcacctgaggccaggagttcgagaccagcctggccaacatggtgaaaccctgtctctactaaaaaatacaaaaattagctgggcgtggtggcgggtgtctgtaatcccagctactcaggacgctgaggcaggaaaatcgcctgaactcgggaggtggaggttgcagtgagccaagatcgcaccactgcactccagcctgggcaacaagagcaaaactccatctcaaaagagacaaaaacaaaagcaaaaacaaacaaaaaaggaagatgatgaggtggacgaccccagctcagcccctcacacccaaaacgtgccctacggaccagagcgatgcaattgcccctctcctccagcagagggagactccacccacagcacagggcagggttggggcctgaatgatagaggagagtggaggtgggaagggttggtggaggggccaacaaggaatcttggtcccctgaccctgggtgctgcacatccatcccctagatgccaaaaatgttgcttaccaattcgctgctccccagagaccaaccccaaacctaaccttgaccaccacctcttcctgcgccattacttccagttcacaggtctgtccccagagggtgctctgattttacccacatcacaagaaagtgatgaatgggctgggcgcagtggctcacgcctgtgatcccagcactgggaggccgaggtgggcggatcacctgaggtcaggagttggagaccagcctggccaacatggtgaaaccctgtctctacaaaaatacgaaaattaaccgggcgcggtggcgcacgcctgtaatcccagctactcaggaggctgaggcagaagaattgcttgagcctgggaggcagaggctgcagtgagccaagatcatgccattgcactccagcctgggcgacagagtgagactccgtctcaaaaaaaaaaaaaaaaaaagaaaagtgatagctgaaggtgggccttctgtaagaaagtaacaggcgcaaacatccaggaccctcccagtgactgtctgcaggtagggatccatgtggagctcacttttcttgaccccctcccaggaacgtggtcctggtatgggacacaattttccaggttttaacaaaagtcacccctgggtcccaatggactcctccagtggggctgtcttgtgtgcacagggagaggaatgagggaagaggctgccagaaacctgggaaagggacctgccgggatgggcactgaccactcccatggctctcaaaaactccagaaggaccacggggcagtgtagactcaggacgcctttccctgccctcagtccctgtgtctcctcccctgtgagccgctcccggccccactgaagggccacctctaaggaagagtcacagggctgccttccctgcctctcagcctttcagtcgggtggttctcagccagctgggattttgctccatcacaactgcaggggagggtgcccctaacatctagtgggtagaaaccgggaatgctcttaaacatcctacaatgggctgggcgcggtggctcacgcccataatcccagcacttggggaggccaatgccggaggattgcctgagcccaggggttcaagatcagcctggccaacatagtgagaccccatttctacaaaaaatttaaaaattagccacaggtggtggtgcacctgcagccctggctagtggggaggctgaggtgggaggatcgcttgagcccaggagttcaagactgcagtgagccatgatcatgccactgcactccagcctgggcaacagagcaaaaaccctgtctctgaaatcaacatcctcagggtctgggaaaatatagtatcgaccagaaaagtgtgaaatatgaaatagaaaacaaacaaaaacctcctacgacacccagcacagccctctgtgcattgtggaatgtttaagggcatgtccaaggatgtgtgtaagaccacaacacagaattctcccacccaaaaagtcagcagcacccaggctaagaaactgtctgcagcctaatcctgcccccttttttttttttttttttttttttttggagatggagttttgctcttgttgtccaggctggggtgcagttgtgtgatctgggctcaccgcaacctcctcctcccgggttcaagcgattctcctgcctcagcctcctgagcagctgggattacaagcatgtgccaccacacctggctaatttttgtatttttagtagaggcagggtttctccatgttggtcaggctggtctcgaactcacaacctcaggtgatccgccacctcaccctcccaaagcactgggattacaggtgtgagtcactgcgcccggcctaatcctgccctcttttagcagaagtagagatagagactttagaagttcagggactcacctgggatcccagggatatcccagccacgcctcggctggggactgacctaaacccatgcacagctgcagagctaccagcacatgcctccctggctctggaaagagactcgggctgtcactgctacctgaggacagctggcagagcgtgaaatcccagaaagccctcttttcccacgcctattctgatcttgccagctctggttctttctgggggcactgggacacggtcctcctgaacagcagcctccccctccctgccagtgcggccgccggggagagggtgggacgcggggagggaggggaggtactcccagcacccatgagcgccaccccagagcccacgttgatgatggtgggaatgatgctgaacttccctgcctggaagatagagacaaggccagtgagcgaggcaggttggacagcggggcccccagggaccctcccagcgtccccctcccagcctgagaacaggagaacgcacagcggggcccccagggaccctcccaacgtccccctcccagcctgagaacaggagaacgcacagcggggcccccagggaccctcccaacgtcccccgccccccgcccagcctgagaacaggagaacacacagcggggcccccagggaccctcccaacgtcccccgcccccccgcccagcctcagaacaggagaacgcacagcggggcccccagggaccctcccaacgtcccccgccccccgcccagcctgagaacaggagaacacacagcggggcccccagggaccctcccaacgtccccctcccagcctgagaacaggagaacgcacagcggggcccccagggaccctcccaacgtcccccgccccccgcccagcctcagaacaggagaacgcacagcggggcccccagggaccctcccaacgtcccccgccccccgcccagcctcagaacaggagaacgcacagcggggcccccagggaccctcccaacgtccccctcccagcctgagaacaggagaacgcacagcggggcccccagggaccctcccaacgtcccccgccccccgcccagcctcagaacaggagaacacacagcggggcccccagggaccctcccaacgtccccctcccagcctgagaacaggagaacgcacagcggggcccccagggaccctcccaacgtcccccgccccccgcccagcctcagaacaggagaacgcacagcggggcccccagggaccctcccaacgtcccccgccccccgcccagcctcagaacaggagaacgcacagcggggcccccagggaccctcccaacgtcccccgccccccgcccagcctcagaacaggagaacgcacagcggggcccccagggaccctcccaacgtcccccgccccccgcccagcctcagaacaggagaacacacagcggggcccccagggaccctcccaacgtcccccgccccccgcccagcctcagaacaggagaacgcacagctgggcccccagggaccctcccaacgtccccctcccagcctgagaacaggagaacacacagctgggcccccagggaccctcccaacgtcccccgccccccgcccagcctcagaacaggagaacgcacagcggggcccccagggaccctcccaacgtcccccgccccccgcccagcctcagaacaggagaacgcacagcggggcccccagggaccctcccaacgtcccccgccccccgcccagcctcagaacaggagaacacacagcggggcccccagggaccctcccaacgtcccccgccccccgcccagcctcagaacaggagaacgcacagctgggcccccagggaccctcccaacgtccccctcccagcctgagaacaggagaacacacagctgggcccccagggaccctcccaacgtcccccgccccccgcccagcctcagaacaggagaacacacagctgggcccccagggaccctcccaacgtccccctcccagcctgagaacaggagaacacacagctgggcccccagggaccctcccaacgtcccccgccccccgcccagcctcagaacaggagaacacacagcgggacccccagggaccctcccaacgtcccccgccccccgcccagcctcagaacaggagaacgcacagcgggacccccagggaccctcccaacgtccccctcccagcctgagaacaggagaacacacagctgggcccccagggaccctcccaacgtcccccgccccccgcccagcctcagaacaggagaacacacagctgggcccccagggaccctcccaacgtcccccgccccccgcccagcctcagaacaggagaacacacagctgggcccccagggaccctcccaacgtccccctcccagcctgagaacaggagaacacacagctgggcccccagggaccctcccaacgtcccccgccccccgcccagcctcagaacaggagaacacacagcgggacccccagggaccctcccaacgtcccccgccccccgcccagcctcagaacaggagaacgcacagcgggacccccagggaccctcccaacgtccccctcccagcctgagaacaggagaacacacagctgggcccccagggaccctcccaacgtcccccgccccccgcccagcctcagaacaggagaacacacagctgggcccccagggaccctcccaacgtcccccgccccccgcccagcctcagaacaggagaacacacagctgggcccccagggaccctcccaacgtccccctcccagcccccgccccccgcccagcctcagaacaggagaaggcacacgcaccttgccgttcaccatcacgtcaaagcggatcccgtaggctttcatcagggtgcggaactccaccccggctgcgtctcggtaatatctggcaaatctgagggagacagggcccaggggaggcctcagcctgcctggccttccctctttaggcagcactgatgtggctgctctggggacttagaaggactcccggaaccctgactctcagcagccccaggagtggcttgcagaccttctcactgagccaaaaacaaagaggcatccagctatttgaaatccctgccagacattccctgaggagcaagggcttccccaccctactctgagcaacccttgggtcgccaaagcgcggatggaaaggatgcggcagaggccgcaagactcggcttcacggagagaaacaggcaagaacacgcgctctcctctcccagaggcacccccagcttcagtcgctggccactctgctggggtccacacctctcctgggccatctgtccctgcacctcccgctctgacacccacccccaggaaggggcctcaatagtgctggcacccagatgagtgagtgccactgatcatggtcaggtcacaagtgggcacaaggcagcggttacctgaagttgtacccggaggagacagactttgaaagtttattgtccagacggctaaaagaatagtgagggtggcactcagaggcagctttatcaagatcacagttccattcaatattaattcctatcacgccacccttgataaaagagagatgagggtcagcacacacagctttccggagacggacagcatcccaggccagcccttcaccggcactggacaataggaggaggtgctcaggcacgaggtcagcccctcgagaccaccctccaggaggcttagtccccccatggagcggctgagaacactgcgtcgtccctgcctcagggctgcctccctcgttcttcagggagaagggagccgcacagggtaggcctctctggacaggcacttcacactccagccagcatgtgccaaagggggtccctctgcctcaccttcggctggtgccccaaggactcagaaccgcacagcaggtgccaggtctggctctcactgactgcccgtggtctgagcgctgccacagcctgcctgtgtgccacagccagttctgaaaacactgagtccctgggggcaggtgactttgcagggccaccctcgcccgctgccacggcctgcctgtgtgccacagccagttctgaaaacactgagtccctgggggcaggtgactttgcagggccaccctcgcccgctgccacggcctgcctgtgtgccacagccagttctgaaaacactgagtccctgggggcaggtgactttgcagggccaccctcgccccacgagtccccgtccacaccctcctcgtcacagagccaggcccagtgcccccaggccctcagggagggctccctgcgtgcaccccacccacctccagggctatatcctggaagtcgctcccggcccagcggatcacggagcccagtcggaagatggggcagtagtggttcttggggccaaagtggcatgatttcaggaaagatctgtccttgacgtccatcacattgcttctgggtggaggccatgggcagccgagaaatgaagtaagacttgatgtttcccggcctggccaggagtcactcggtccctcaccaacctgagtgctgacagctccccgcagcaacaccccactttacagcaggggaaggggcgccccagcaccacccaccgtttattcacatgcagacatcacccactcacatgcagacatcacacacacacgcacacacgcgtgcacgcacgcacacacgcgaacacacgcacacacacaaacgcacgcacacatgcacacagacacatgcacgcgcacacacgcacacacgcgaacacacgcacacacgtgcacacacgcgcgcacacacacccccaggcagagacccacggagggccagccaaggcccctcatcgaccaaggcccacccgtggcccccagtagccaagcccacgtacttggagaagttgaatttggggaaacggatgtggttctttatgaaaatggtgaagtcttcggcctccttcaggaatggctccctgaaaaccaacccagaacagcctgtccaggaggccccacccctgtgcccctcccccaggcctgggccagtgtgaggcctgttccttgggtcccctggagcctctgcccaggacagttaatttgctcatgctggggaggccgtcgggcctcgctgggacagcctgactcctccctcagcgtgaggctcccagagtgggcaggactccaccctcaggctgggacccaccgcacggggctgggaaacccctcagggtcctgaggctgcagccactcactccggcctggagcttgtctccaacgggcaccaggcaaagatctcacaggtgcccctggccaagttctctctccgcaggcagcggccggtcttcactcctgcaggggtgggacaggatcaatgccaggagcctcccactccgagtcctccttcagcccgtggccgctccaggccctcaccgtttccagctgtaaccgcttccccagcgtggcagtcgctgtccttggagcacgcgccatcaggaatgccttcattctgccaggagagaaggggcacctggatgggggggttcccccagctcagagccgggtcccactccaggagatagaataggggttcttcttcggcctggcccacacacactctgagaacctacttctcccccatataatgcaggaaccacacccgggtgcacacagccacccgagacccttggagtggacagacacccttgcttcagaagagagtagaccccaaccactgccggtggctctcccacccccacgccagggcccctcgccaaatcaaacctcagcacagacgttctgccgctggttgggggtcacaatcaggttggtgaccacaaaaaagacgttctctccctaaggaaccagagaggcactgaggaacctcctcctgccccttagggaccaccccacctttccagcgttacctgaaagagggcggtccctctgcctgggttttggggataatggggccacaaacttggtatactctgcccatctgctcatggaccccacagtccccaggtagatgtccattgatagatctcctccagactcacaaaccccaactgccccaggatccgggagaagtgggcgcagggctcaggctgccctggccctggccaactgtgaacaggctggagagctattcccagaggcagtgacttagaaggggggttctctgtgccagcccacctgactcacaatgacctgaaagttctctgggtcccatttgttctcagcagactcagatagaacagagcagtcacccgcggcacagtcaaagagggcaggggtttggcatgggaggtaggatctggacagggttgctctctgcaagccctggcagctgtcttgggccaagagagatgatggatgggggtccctgcgtatccaagaagcttcccgtgtgacccacccgaaccaggcagtccctgccagccttggccgtgtgctaggtggggactcagacctgggctggaatgacgtagtcggcgacatcccagatccgctgcccaagatccgaggtgttggtgaaggccacgcccttgactttggtgatgacagcactctgcagggaggtgtcgacgtcttggtaacccttctttatcaggaacacccatctgtgggaagggggccggtacgtgggcatcagccactctgctggcttcggggagcttccccaggccttggggtggggtagcagtcacagcaactcctagttgaggtggagcaggctcagggctccacctgtcccaccagctcctgggcaggggccacagctcccactgctgactgaaacccagtcctgcaagcagcagaggcgacaagcaaccctagagatgggggccctgaagaggcaaagaccagccgggcgcagtggctcacgcctataatccgaggcaggcagatcgcaaggtcaggagattgagaccatcctggctaacacagtgaaaccctgtctctactcaaaaaaaaaaaaaaaaatacaaaaaattagccaggcgtggtggtgggcgcctgtagtcccagctactcaggaggctgaggcaggagaatggcgtgaacccgggaggcagagcttgcagtaagcagagatcgcaccactgcactccagcctgggcgacagagtgagattctgtctcaaaaaataaataaataaataaataaaagaggcaaagaccactgtccactcagaggccccaagtggacaagcctgggctgaagccacatactggtttggtgaccccaggcaagccaatttcccatacataacatggggtgacagcgcctccctctggggttgtgatggtgcctaacctgaaaccaatcacgaggagacctcaaacaaacccaaactgaggggcattctacaaaataagagtacaggccaggcacggtggctcgcgcctgtactcctagcactttgggagaccaaggcaggaggatcgcttgagcccaggagtttgagaccagccggggcaacacagtgagaccccatctctatgaaaaacaaaaaagtaatctaggcatggtggcaccagcctgtcgtcccagctactcgggaggctgaggtgggaggatccctcgagcctgggaggtcgaggctgcagtgagccatgattgtgcccaggtgacagggtgagacccagcctcaaaaacaacaacaaaaaaatgaaataagagtacaaatcccatacttgttgacactaaaaacgcaagcaataaaagaaaaaataggtaagttggacttcataaaaatttaaaatgttcatgcatcaaaagacactctcaagaaagtgaaaagacaacccacagaatgggagaaaacatttgaaataatgtagctggtaagggtttagtatccagaagatacaaaaaactcttataatttaacaataaaaagccaaataatccaatttaaaaatgagcaaaggatttgaatagacatttctcaaaaaaaaaaaaaaaaaagagagagagagatacacaaatgcccaattaagcatatgaaaagatgacaaacaccattggtcattagggaaatacaaatcaaaaccacaataaaacaccacttcacttccactaggatggctatcattttttaaaaaccctacagataacaggtgttgatgaggttgtgaagaaattagaacccccgtatatcactgatagggatgtaaaatgaggtagttatggtagaaaacagtttagcagttcctcaaaaggttaaggatcgagttaccagataagccagaaaattcccaagagattgagaacatggccaggcacagtggctcccgcctgtcatcccagcactttgggaggccaaggcaggtggatcacctgaggtcaggagttcgaggccagcctgaccaacatggtgaaactccgtgtctactaaaaaaatacaaaaattagccaggcatggtggcccatgcctgtaatcccagttaatccagaggctgaggcaggagaatctcttgaacccaggaggcagaggttgtagtgagctgagatcatgccattgcactccagcctgggcaacaagagcgaaactccatctcaaaaataataataataataattaaaaattgaaaaattgaaaacatgttcacaaaaaacttgtacatgaatgttctcagaagcattcttcttctttttttttttttgagacagtcttgctctgctgcccaggctgctggagtgcactggtgcgagtagctgagattacatgcgctcgccaccacacccagccaatttttgaatttttagtagagacggggttttaccacgttggtcaggctagccttgaactcctgacctcaagtgatccagccaccgcggtctcctctcccaaagtgctggggttacaggcatgagccactacactcagcggtgtgaaaaccacccaaatgtccatcagctgatgaatgcatgaccacaatgtggcagccccacacggcaggatagtatcagccacagagaggaatggagggctgatagatgccacaacatgggtgaaccttgaaaacatgacaccaagtgaaagaagccagaaaaaaaaaaaaaaaggccgcatactatacaatttcatttatacgaaatacccagaataggcaaatccatagagacagattctcctgcctcagcctcccgattagctgggattacaggcgccactatcatgcccagctaattgttgtgtatttttagtagaaacagggtttctccatgttggccaggctggtctcgaactcctgacctcaggtgatccacccacctcggcttcccaaagggctgggattataggcatgagccacagcgcccggccgccaatttcctaattttcatacttgtacttagttaaatatgtcctgctttccctgccatgtgaggacacagcgagagggtggccatctgcaagccaaggagagagccccccctgagaccccgaaccatgctaccaccctcgtctcagatttccacatccaggactgcgagaattaaatttctattgttcaagcaaaagcaactccatttattcattcatgcgttcatttcacatctattccctaagcagttaagtgctgctggggccccaccctcagggcattcccggactgacagcgacatcaggcaaatgatcccccaaataagcccaataattacactgtgggaaggccagggaggaagggagagggagttactggaaagcccagatctgggggctgagtggatgctaagggagtggaggaggacgggcaggcctggctgagcaacagcacagcgcctacgaggccgctcaggtgggaggcggccaggggcctggggatgcagctcagagaacgcggactgctggacctccgagggagagccaggcgtcagggctgccctcccaggaggaagcaggaggaactccaccgcatttactgaacgagtggaatgaggcgcatccccattgtccagcgctgcttctcccctccacctgctcacccccgacccaccccggggtcagggctctgaaggcgcctggcagagcagcctccacaagttgcctctttggctttgtggcgccagctcctgccaggtggcatgaggatgggggaaggggatggccgagctgggtgcagagatagaggcctctgggcaggacccccagctggacaccagagaggctggccgcgggtggggcaagttgaccggaagggagctcaggaacatgccgggctgatgagtttctccagctctgagtaggcagtgacaccctgtgattataaataacctgccggcgcctgggtcagctgccaggccaaggcccagggaggctcctggggcgacagctgccacccagccccctggcatccctgcccccttcccatggccctaacacgtggggacccgactctgggagaagcagctgcagggaaagcctgataaatcgaggaaaccagaaggcccctgcccacctctcatcacctctagcgccagtgggggagtggagagccccctctctacaccctactcctacacccaaggacccaaagaggacccccacagcaagcaggctcacagacccccagctaccgggaaaaccgcgtgcacgcctgcgaattccaggaccctggagaaggacgcggcggctggcacccgccctgcccctcccccgccttcccaaaagtccgcggagaacttacacgaccaggtacgccaggatggaggcctgcagcagccggtacagcaggcccaccttcttgttcttggcgatgacatacttctcggtcttgtagtcgaacagcgacaggcagagccccttgcagcccgcctgccccatggcgcgctctcagccgggcttgcggaccgcccggcccacgtgcgctcatggggagcactcggtccctcggtccctgcgcgcccggcgcccgcctcggcccgtctgcgcccgctcagctgcagcccggggtgtccggcagggctgcggggcgcgggggcgggtcggggcggccttttattgacgcggttgagaaagcctcggctgggagctgggcggcggcgagcaccggaacctcagaccgcgaccttgccgctacctcttcttcctcctcctcctcctcctcccctgacacagtgacacccctgcaacctactccccagccaccggtctgggagcgcagccccccggatgcgcaggaccgccctgtgctgttgcccagctgaaagcagcgatcgcggaggagaggaagtgaaagggggaagggctcctttttattttattttaaatttatttattcatttatttttgagacggagcctcgctctgtcgccgaggctggagtgcagtggtgcgatctcagctcactgctacctccgcctcccgggttcaagcgattctcctgcctcagcctcccaagtagctgggactacaggcgtgataatttttgtatttttagtagagacggggtttcaccatgttggccaggctggtcttgaactcctgacctcaggtgatccgcccacctcggcctcccaaagtgctgggattacaggcgtgagccaccgcgcacggccgggaagagctccgtttaaagcaaaactcccctttctctcgcaaagaaatcccaaagggttcttcctattgaatagatggggaactgaggccaggggaggaaggaaggggacacaacaggtttctccattcacctcgcgccaggtctcctgccagggagatacattcttgctccgtgggcagggggtggttgtgggggggaagccgtggctcccccacaggctggaagagacaagacttgtcccacctgaggctgcctgtgtctgctgcgactaatgcgcgtttctactgcagcagctgctgcaggtttaaaagcccacactccggcggagtcggtggtcaggcaggtcccgagtgccggcagcatgaagacctccctcccacactcagggcggatggtgcgggggtggggggcagacggggtgggggcggggagacacaggcaacccaccctaggatcctaaaaatatgcctggagagtgcgcatgtaccaactgtttggaatggttcccaacgcacaagaaatagaactgatccatgcagctatgactgcaaccctctcagtatgtggaattcaacaggagtgggagtgggatgagggagggcctccgggggggcaggtttagaactcctgacagccaaagacgcagggccctgggtgagcgcggtgtggtgaggagctgcgcacgcttattttctgcatcctgcagtctgaccacaagcagtcctgctcctctccctacccctggctttcacacacaaagaggctcccttccctaagccacagactcggggaactggaaggtaccctgaaattcatcagtgtgattctaaagtaaaagccccaaggaaggtgtccagtttcaaagtgcatgggaatcatgtggaagaaaaaaaggcaaattcctaggccctgcccctcaaattttcattcacgaaatctaagatggggctgggaacctgtattttgctctcaaactgtcatttgggaaagcgtggatctttgcatcttttcatccatttcaactcaactgccatttcttcaaaaaggcctgttattattgcccacccaaagtagcccccagtcccagcccagccactttctatcccattatctcatcttattcccttagagcacctgtcactatccagtaggatctcgttgacttagtgactgtgtcccatgctaagaccagaagctcccggagagcagggaccatgcctttggacatctctgtatgtccctgtgcctgccacataatagttctagacatattattgaatgagtggacaaacctggccctgatttttttttttttcaacagggagggcatttcgattccaccctgccccagtcatgactgcgaattttaggggctgaagtcatcttggctctcctgccagcctcctcctcagccccctgctaacacagcactccaatgctcactaaagcagccgccaccgagtgacatcacccctaagaagatgcccgtcaccctgacagtgctgctccagggtaaggtatagaggggaggtggactttcagagtctcacaggagtcgcctgaattgcatctgccctggagaagagcttgcccatcaaccccagcacaggacaacatgagtgtcacagagatggtgccacattgagtctctccactccccaagggagttccaggttttgttccagggcctgtttgttctttgaaggggtctttagagaccaggaccttcatttttctggggtgattagggaaggggtgagtaagtgaggccccagagcagagcctaccactagccccagtcccaggcactctgctgttcttgattcatcaaacctttgtgtgctactggagaggctgaactgccaggcacttgccctccatgtcctgtcttaactgccactgtggctttagagaagggctctgctctgacttcccctccagtacaggcagcccctcctgaactccccacggcacagccaagaccaggctgcaacttctgacggaactgtcctgaagctttagagaccacatgaggggcatctagaggggacagggctctcggggacaggaccaggcccatccttacggggtcccttactgcacagcttcagagactagatccagacccactggtgaggcatgacatcaaattactgggcgacaaccagcattaaaaaaaataggttgggcacaggcgctcatgcctgtaatcccagcactttgggaggctgaagcagcagaaccgcttgagcccaggagttcaagaccagcctgggcaacatagcaaaactttgtctatatatatagacagacacacacacacacacacacacacacacacacacacacacacctatatatataactagccaagtcaggcacagtggctcatgcctttaatcctagcaccttgggaggccaaggcaggaggattgcttgagcccaggagttcaagaccagcctgggcaacatagggagaccccttctatacaaaaaataaaaaattagctggatgtggtcgtgcacacttgtggtcccagctgcttgggaggctgaggcaggaggatcacctgagcccaggtgggttgaggctgcagtgagccattattgcaccactgcactccagcctgtatgatagagaccctgcttcttaaaaaaaattgaccaggtgggatggtgcacacctgtagtcctagctgctcaggaggctgaggtaggaggatctcttgagcctgggagttcaacactgtagtgagcaattatcgcaaataaatagaaaatattgccggatgcagtggctcacacctgtcatcccagcagtttgggaggccgaggcaggtagatcacgaggtcaaaagtttgagaccagcctaaccaacatggtgaaaccccctctctatgaaaaatacaaaaattagccaggcctggtggcacacgcctatagtcccagctactcaggaggctgagacaggagaatcgcttgaacccaggaggtggagcttgcagtgagccaagatcgcgccactgcactccagcctgggtgacagagtgatactccatctaagaaagaaagaaagagagaaagagagagagagagagaaagaaaaagaaaaaagaaagaaagaaagaaagaaaggaaggaaggaaggaaggaaggaaggaaggaaggaaggaaggaaagaaagaaagaaagaaagaaagaaagaaagaaagaaagaaagaaagaaagaaagaaaattagtgtatttaaggaagtattggtgttatgtgaaacttttgttttaagtgtccacatatggcattgtgatgtggaatatacttcttcctgtgggtcacagtccaaataatgtggaaaacacttacaagctgtggcccccagtatctgcattctatctccccatggctgaggccaactcaccaccctcacaagcacatgccaaacacccattgtgcccagtggggagatgaggactttgctttttacacctgccttattaaaagtccaagtcagggccgggcagtgtggctcacgcctgtaatcccagcactttaggaggccgaggcaggcagatcacgaggtcagaagtttgagaccagcctgaccaacatggtgaaaccccctctctatgaaaaatacaaaaattagccgggcctggtggcacgcgcctatagtcccagctacttgggaggctgaggcaggagaatcgcttgaactcgggaggcggagcttgcagtaagccgagactgtgccactgcactccagcctgggcgacagagtgagactctggctcgaaaaaaaaaaaaaaaattccaagtcagggacatttccaaaaccaagatgaattctccaactgagagaaaaatgcctgctgctttcgagtgatacagtttggatgtgtgttcctccaaatcgcatgttgaaatgtgacctcccatgttggagggggcctagtgggcggtgtagggtcatagatgtggcttctttatgaatggcttggcactatctcccggataatgagtgaattctcactctggtagttcacgcgagagctagttgtttaaaagaacctggtacctcctcctctctctcctgctgcctctcatcctgtgacatgccagctcctcctctgtcttccaccatgattggaagcttcctgaggcctccccagaaactcccctcaccccagccaggggcccagggcgaatggctggtgttcagagcagtcacaaccccctcactgcctcaccacggcccccctccttctcctccctcacaggagtccacatcacgcttccctgtaatgagtataatcccttcctgttcacctgaaataaaggacgggatgagcagtgactgttgttccgttgttgtctgatttacaagcctttgtctagttcaagcttgtccaaccctaggcacaaggacggctttgaatgtggctcaacacaaattcacaaactttgttaaaacgttgtgaggttttttttgcaattttttgttttttttagctcatcagctattgttagtgtgagtgtatttacgtgtggcccaagacaattctttttccaatgtgacccagggaagtcaaaagattggacacctctggtctagttggatgatttaaggtacctgcagtgaagtgatgagaactataaaatgaacttctaagtccgggcgtgatggctcacgcctgtaatcccagcactttgggaggccaaggtgggcggatcacctgaggtcaggagttcgagaccagcctgaacaatatggagaaaccccgtctctactaaaaatacaaaattagcccgtcatggtggcgcatgcctgtaatcccagctacttgggaggctgaggcaggagaatcacttgaacccaggaagcagaggttgtgatgagcagagttcacaccattgcacactccagcctgggcagcaagagtgaaactctgtctcagaaaaaaaaaaaaaaaaaaaaaaaggaacttctaaagggacattttctctgttttttttttttttgttttttttttttaagacagagtcttgctctgtctccgaggctggagtgcagtggtgcaatctcagctcactgcaacctctgcctccccggctcaagtgattctcctgcctcagcctcccaaatagctgggactacaggcacacaccaccatgcccggcggtgagtaatttttttgtgtgtaattttttcgtatttttagtagagacggagtttcaccatgttggttaggctggtctcgaactcctggcctcaagtgatccacccacctgggcctcccaaagtgctggtgagagatcaagccagctggacttcctgggtcgagtgaagacttggagagcttttctgtctaggtaaaggattgtaaatgcaccaatcagcactctgtaaaaacgcaccaatcagtactctgtgtctagctaaaggattgtaaatgcaccaatcagcactgtgtaaaaatgcaccaatcagtgctttgtgtctagctaaaggattgtagacacaccaatcagccctctgtaaaagcgcaccaatcagcattctatgtctagctaaagattgtaaacgcaccaaccagcactctgtaaaatggaccaatcagcgctctgtaaaatggaccaatcagcgctctataaaatggaccagtcagcaggatgtgggtggggccaaataatggaataaaagctggccacccaagccagcagtggcaacctgctggagtcctcttccacgttgtggaagttttgttctttccctcttcacaataaatcttgctgctgctcactctttggatccacactaccttgataagctgtaacactcactgcgaaggtctgaagcttcactcctgaagtcagcgagaccatgaacccactggaaggaagaaactctggacacatctgaacatcagaacatcagaaggaacaaactccagacacaccatctttaagaactgtaacactcaccacgagggtccatggcttcatgcttgaagtcagcgagaccaagaacccaccggaaggaaccagttccagacacattgggactatatgcgtgagccactgtacccagcctgccattttctttttacatcatctcccttgctcctaagacttgccagcattttaaagtctattattgtggtctggacccactctgggacatcctggtctgctctgagacctgggacagtctctgataaaatcctggtggactcccaaatgtatccagtaaaagctacgagggagcctcagacagagccctcccctcctccaaagaaatgtgctgggggcctcacctgggggaaaccagactctcctgcctctgatcccaagctttccccacaccagtatctgttccttctacacattttatagatgaaaagcgagaatgtatggtgcaatgggctgagcctttagagacaggggaattactcctcaaatagaaaaactcaacaacaaacgaggccaggcccagtggctcacacctacaatcccaacactttgggaggctgaggtgagaggatcacttgaccccaggagttagagaccagcgtggacaacgaagtgagactcttgtttctacctaaaaaaacaaaacaaaacaaaaaacattaaaaaattagctgggcatggtggcaagtacctgtggtcccagctccttgggaggctgaggtgggaagattgcttgagcccaggagattgaggctgcagtgagctgagatcatggcactgcacttcagcctgggtgacacagagggatactttaaaaaaaaagaaaaagaaaactcctcatttccctatgggatgaagtgcttccaagaggaaaaatgtcagctgcaggagagttgccaacagcatcactgttcccagcagcagcttggaggtgtcccttggtcacccctgcagcctctgaagacacgtgggttctctcttcccctccagctctggtgagggtgaaataacacctcccccttagcctgagattccaacaaacccaaaaaacattccccacaaaattaaaggaaacaaaacagaaaataaacaacatttaaaaaccccagccgggcatggtggctcacgcctgtaatcccagcactttgggaggccgaggtgggtggatcacctgaggtcaggagttcgagaccagcctgaccaacatggagaaaccccatctctactaaaaatacaaaaaagtagccggacgtggtggcacatgcctgtaatcccagctactcgggaggctgaggcaggagaattgcttgaacccaggaggcagaggttgtggtgagctgagatgacgccattgcactccagcctcggcaacaagagcaaaactctgcctcaaaaaaacaaacaaacaaaacccaaaaaaccacacaaaacccaaatcccataaaatcatatggttcttggagtagaggttcagatgttacttccttatggtgaattctatttcccacctcaaaggagcaggaaggcctggaaggaggagatttgaatctctcctggggcacagaaggtcattccgcgataagggggccagctgcagacccagccttcctgccgagtcctgaggagctgggtggcccagagagacaagagtgggcaggggtggtacgggaagagtttcaccaagagcctcccaaggcaactcgcccttttccttttgctgaggtccttccatgacggacatatcccattaatagacattactgatccacttaaatggcagatgcattattaacgccatgtaaatgcagtcaacagaaggcaggacactcctctctgtgggaggcacttccgtgcccatcagcaccttgtgtgacccaccgtaattgatgggttggtactcagtacccagcgcccaatatttgaactgaggaaaattccactgagacagtaaacacttgaaagagtaaagagccaaatgctagtccactgggcactaaaaaggataaagattcaggccgggtgtggtggctcacacctgtaatcccggcactttggaaggccgaggtggacggatcacctgaggtcaggagttcgagaccagcctgaccatcatggagaaaacctgtctctactaaaaatacaaaattagctgggtgtgatgatgcgtgcctggaatcccagctactcgggaggctgaggcaggagaatcgcttgaacctgggagacagaggttgcggtgagcggagatcatgccattgtactacagcctggacaacaagagcaaaactctcgtctcaaaaaaagagaggataaagaatcaaactcgagtcaaccaaatccacaaagcagtgacaagtctaccacggtacctcttagagctacgcacatcttgttctaactccagttcccggcgctggcttcccccacagcatgtgtgaactttctcacacgcatccgctcctctccactcccaagttccaggactgtggtgatgcaatgagaatgagtgtgagaatggtggcaatgcaatgagtgtgaaacccacgtatcaaataccacgaatgcccgtgtcttcccatagttccctgtacacgattcggatccaatgcacagtcctacctgccttcccagctacacagtccccactgcacactcagcctcagccagcttggctcgtgggctttaccatagttttcagtgtccagcttccctacctttgcccaggtggatctctcctctgttcttcatggcttcgagggtcagcttacaggtgtctctctccttcatgaaggcctcctcaattgctgtcctcctccaaatgtccacacgataggatctgtaccatttagagaattcattgctttctccctcgctgtcacagttgggtacatatctgtcaagcaggaaaggccttcaacagtctgaccacaggacctgcatgaagtaggtagtcactgaggcttgtagaatgatgaacaaagaacgaatgaatgaaatttctaatcacccattagcctgtatacttgaagtgtctggggtagagtgactaagtgacttttatttttgtgtgtatattaatagaagattacttttttcttttttgagatggtgtctcactctgtcacccaggctggcgtgcagtggcacaatcatggctcactgcagccttgacctccttgggctgaggtgatcctcccacctcagcctcctgagtagctgagactacaggtacatactacacctggataatttttttttttttaagacagagtctcactctgtcggcaggctggagtgcagtggcacaatctcagctcactgtgacctctgtctcctgggttcaagtgattcccctgcctcaccttcctgagtagctgggactacaggcgcgcaccaccacgcctggctaatttgttgtattttagtagagacggggtttcatcatgttggccaggacagtctcgatctcctgaccccgtgatctgcctgcctcagcctcccaaagtgccgggattacaggcatgagtcatcacgcctggcccctgggtaatttttatgttttctgtacagacagggtttcgccgtgttgcccaggctggtctcaaactcctgggttcaagtgatctgcccaccttgcgctctcaaagtgctggggttacagctgtgagccactgtgcctggcccatagaagatttcaacagacgtaattccaccagagcagtaagttaaaattcgtctcctgaagtaacttactcatcaccaagactccaggtctgtgctgagtgcagcccattgacaaagtgtaaccagatgaacacacacactgatctcataattagcatctcacagggtgcggctcccacatcaccaccacctggagcacatgccgaaaaatgcggaggcccagatccaagccaagctagagcgtcagagccttcgggggtcggagcaaggagccagtgtgatctcggctcaccgcaatctctgcctcccgggttcaagtgattctcctgcctcagcctcccaagtagctgggactacaggtgcccaccaccacgcccggctaatttttgtattcttagtggagacgggttttcaccgtgttagccaggatggtctccatctcctgacctggtgatccgcccgcctcggcctcccaaagtgctgggattacaggcgtgcgccactgcgcccacctataatcttgataccaacagaaattgtatattcctgtcacattacagctaccgcaggtatctcaaaatataatgtaagctcatcaccactttggaagtagggtagttattagacctgctgctttaaggcattaataaagatatacaaacatctctatataaatttttaaaaacattctgattgttagatttcaatgtaattgatttttataaacttttattgtttaaaaataagctgatagacggttgggaaaacggggcaaaacaagcagaggaaaatgctaacagcagaaactaggtggtgggcagaccggtgttcactgtagaattcgacttttctgtatgtgtgaacattttcgtaatgcaacgtttgggaaaatacctgacaaggggttgctggaccaccaaaaggatctacagcccaccgaacagtcagaaacccctaacctagaggtactggtgtccttaaccagctagccaatccagtcagttcttcatccgggagccaaaagaccccaggcctgggtatcccaattccacttaggctggcagccttttgccagactaagaaatcaaaaaggtttgcagcaccaaagtgagccagtggtgttttctctcattcatcccagcactccaaccttagcctcagatctcacagctctaaagagaggaaagatcacgccgagaaaccaaagccaagagctcgaaaacgtctggcagttctgggaaggactagtccagacccccctctcggccctggacagaagatgaggcatccacagagaccacaccttcagtccccctgactactgtgcccccaggactgcaactggctgcggggtcctaggagatggttaaccaggaatctcggccagacgcggtggctcacgcctgtaatcccagcactttgggaggccgaggcaggtggatcacgaggtcaggagatcgagatcatcctggctaacacggtgaaaccctgtctctactaaaaatacaaaaaattagtcaggcttggtggcgggcgcctgtagtcccagctacttgagaggctgaggcaggagaatggcgtgaacccgggatgcggaacttgcagtgagccgagatcatgccactgcactccagcctgggtgacagagtgagactccgtctcaaaaaaaaaaaaaaaaaaaaaaacaccaggaatctcctcctcagggacagagggagggcaagggcagggcctctcccagaagcggaagggcaccgtggtcctgtcttctccctggtggtacttaggaagactgtttttcagacagaccaccaatgatgacggctgcttcctaatgcccaccacctcatctgtaagacttagctcccccactttggagagcacatggctctctaatcctattaaagtcaaatcacccttacttgcccaaaggctcagaagttcagaggtagaaatgcacctcttctaccccagaagcagggagcagctcagaaaaagctaatgagaaaataccagggtcatgttgtttgaactggacaagaaagaaaaagcatagaggaaaaaaaaaaaagtcatcttaattcatggaaaaatacatggccttgccaacagtcaaagaaaagtaaaactgaaactataattatatacccattaagcaaacaaattaagtaaaaatggagattccagaacaagttcacgctgctgataaccacataaagtggtccggtctttctggaaagcacttcggcactgcagagcaattacaaaaagtttttaattccactcttggaaaaagctaaaagggcttctttacaaattgtgattaattccccaaagattatgttagcccaagatgatacccttccctctattcccccacctgacccccagcatttagcagcagcatttagcttctgacatgcattccttgaaaacggtcacaaatggcagaagataccatcttatttatgcaacccccctcaaaaaaaaaaacctttgtacttagatataaatatatataaatacttagagatgcacagaatatggtttggttttctttcttttcttttttttgagacagagtcttgctctgtcacccaggctgtagtgcaatggcacaatcttggctcactgcaacatccccctcccgtgttcaagcgattctcctgcctcagcctcccaaggaggtgggattacaggcgcctgccacaacgccaggctaatttttgcatttttagtagagacagggtgtcaccatgttgggcaagctggtctcgaactcctgacctcaggtgatccacccacctcggcctcccaaagtgcccggctcagaatatgggtttggaaagatacacgttaaaccaggtcatctcagcctctgaggaagagcattgaatgaagcaaggttgcgacaaaggcaaattttcactttttactgatttcactatgagaaatgtacctattactcatgtactttacaaaatttgctcccactaataaaaaaacaaagcaagtcaaccgaagttgggaattgtcaatttaggtgcatcctcctgaactctgctattaggacgacgatgcttcctgaagtgattaagtttccctaagccaggcacagtggcacatgcccttagtcccagctactgcagatcacttgagctcaggagttcaagtccagcctgggtaacaaggtgagaccccagtctccaaaagtaaaagttaaaaaattttaatagccaggtgcagtggaggctcaagcctgtaatcccagcactttgggaggctgaggtgggtggatcacgaggtcaggagttcgagaccagcctaacatggtgaaaccccgtctctactaaaaatgcaaaaattagctgggcatggtggcgggtgcctgtagttccagctactcggggggctgaggcaggagaatcgcttgaacccaggaggcggagtttgcagtaagccgagatcatgctactgcaccccagcctgggcgaaagagcgagactctgtctcaaaaaacaaacaaagaaaaacaaaacaaaacaaacaaaaattaataaaatgaaagtttcccttgattccatatactgaatctgttcctagttcaagtaatggtaaaattctggtgccattataatataattatgactagaagacccagaaaatcttaaccaaatacccctccttgtaaatgtattagagatgtgcacagaataatgcagtagtgcagattatttaagactgcaggaggccgggcgtggcggctcacgcctggaatcccagcactttgggaagccgaggtgagcggatcacttgaagtcgggagttcaagaccagcctggtcaacatggtgaaacccagtctctactaaaaatacaaaaattagtttggtgtggtggcatgcacctgcagtcccagctactcaggaagctgaggcatgagaatcgattgaacctgggaggcggaggttgcagtgagccgagatcatgctactgcactccagcctgggagaaagagcaagactctatctcaaataaataaataaataaataaattaataaaatgaaagtttcccttgattccatatactgaatctgttcctagttcaagtaatggtaaaattctggtgccattataatataattatgactagaagacccagaaaatcttaaccaaaaacccctccttgtaaatgtattagagatgtgcacagaataatgcagtagtgcagattatttaagacagcaggaggccgggcgtggcaactcacgcctggaatcccagcactttgggaagccgaggtgagcggatcacttgaagtcgggagttcaagaccagcctggccgacatggtgaaaccccatctctactaaaaatacaaaagttagttgggcgtggcggcatgcacctgcagtcccagctaattaggaagctgaggcatgagaatcgattgaacccagaaggcggaggttgcaatgagccgagatcgcaccactgcactccagcatgaacgagagcgagaccctgtctcaaaaaaacaaaacaaaacaaaaaaaactgctgttccctccaataactgcatccaaagttcagcgggtcccagctcagtccttttctgggtagcagagtggccctatggcatgactcactgttcttggatctatgcaagctctaccatttcctgtcccaggcagagggtgaaaaggaaatgagaaaggcctagcacctaaaaggcagcttgtagaagaaagaccggctgggaaagtaccccatgtgctttctgttctcctttgccctggtacaggatagtgagtgcagattcgaataacctgtttctctcatgataccatctgaactttggagggatgaaaccaatgaaaccaagcaggtgtgaaaacctaaattggccacgttatttagacctcattcaattacgagaaaaggttactccacagggctgagcccagcactcattcttttttttttttttttttttttttttttttgagacggagtctcgctctgtcacccaggctggagtgcagtggcgcgatcttggctcactgcaagctctgcctcccgggttcaagcgattctcctgcctcagcctccagagtagctgggattacaggcacccaccaccacgcccagctaattttgtatttttaatgaagatggggtttctccatgttggtcaggctgctctcaagctcccgacctcaggtgatctgcccacgtcggcgcctcccgaagtgctgggattacaggcgtgagccactgcgcccggcctcattatttatttatttatttatttttttgagacagggtctcgctctgttgcccaggctggagtgcagtggcacgatctcgtctcactgcaaactctgccttctgggttcaagcgattctcatgcctcagcctcctgagtagctgggactacaggtgtatgccacagaccttggcccaagccatagcatatgaatttgtaaaatctaaccatgtcgcacttaaaagtgtcttcctcctcattaagtagttcctgatgtagttcccccgattacagctgccttgctctaacgccaattggatcagcacgactcagtaagtcaataacaaacaggcttcccagtgacgatggaagtggggtcttatttgcaattttaaaaagtataaaaagcaggggcttttatataatatgaaaacttggacacaactcctgagcacaacaggaaaataagtaagcaaacttacctgtgtgttttccctcaaaggcaaattccactgaaacaacccaagagttacaaggaaggggaaaagcctgtggcagcattggaaaacagagaacaatatcatcaagtgaccgatagcacagacggatttctgaacgaaatgaagatgatggaatcagatcaacagggaagcagatggtgcccaacagcctagtgatgtaacactggcaaggtacggggctccatgagaggtgaatgggctgctccaaccaagccctagaaactacccaaaggcagagcagccggggctgggataacaggcaggtgtgaggcaggcagaggagggccagaaaagccctcccattacaaccaggtacacggtttacttctcagagctctccacgtcctagtcaaagaagtaagggtagccaaaagtagaaatatcagaaagactccaaattgccattatttgcaaataaaattgtctccttagaaaaatcccaaagaatcaactaaagagtgatttaaaaacagtttggccgggcccggatttggctcatgcctgtaatcccagcactttgtgagcctgaggcgggtggatcacctgaggtcaggagttcgagaccagcctaacatggtgaaaccccatctctactaaaagtgcaaaaattagctgggcatggtggtgggtccctgtagtcccagctactcgggagggtgaggcaggagaattgctggaacccgggaggcggaggttgcagtgagcagagatcacaccactgcactccagcgtgggcgacagagtgagactccgtctccaaaaaaacaaaaccacagttcagtaaaatggccagataagataaacattcaaaaccaccaactgttctaagtgcaaactctaaacagtcgggggaaaaaacggtattttcacacagtagcaacaaaagcataataacaggtcaggcgcagtggctcacgccccaacactttcagaggctaaggcaggaggatcacttgaagccaggagtttgaaatcagcttggtcaacatagctagatcccatctctacaaaagaaaaattaaaaaatgagccgggcatagtggcttgcacctgtagtcccagctacgcaggaggctgaggcagaggacggcttgaacccaaaagttcaaggctgcagcaacctatgactgcatcactgccctccagcctgggcaacacagtgagacccccccaaaataaataaacaaataaaaatgcagctggaagtaagtctttataaattaagacccctttgaagaaaattataaaaccttgctgcagagtgtttttaaaaatctcagcattgccaggcgcggtggctcatgcctgtaatcccagcactttgggaggctgaggcaggtggatcacctgaagtcaggagtttgagaccagcctgaccaacatggagaaaccccatctctactaaaaatacaaaattagctgggcgtggtggcgcatgcctgtaatcccagttactcaggaggctgaggcaggagaatcgcttgaacccgggaggcggaggttgcggtgagccaagatcacaccattgcacaccagtctgggcagtaagagcaaaactctgtctcaaaaaaaaaaaataaagtaaaataaaaattaaaaaataaatcgcagcaagcggagtagaaaggaaatctataaagatatcaatgctcccaaacttaacctgtatgtttaaattaaaaccccaaagagtttcttctggaaatctgaaaaattgatacttaagaattatctgaaaggatacaatcgataatttttttttgagacagtcttgctcttttgcccaggctggagtgcaatggcgtgatcttggctcactgcaagctctgcctcccaggttcacgccattctcctgcctcagcctcccgagtagctgggactacaggcacctgccaccgcacccggctaattttttttatttttagtagagacggggtttcaccgtgttagccaggatggtctccatctcctgacctcgtgatccacctgcctcagcctctcagagtgctgggattacaggcgtgagccaccgcaccccgcctattttgtttttttctttttgagatggagtctcactctgttgctaggctggagtgcagtggcacgatctcggctcactgcaacctccgcctcccaggttcaaatgattctcctgcctcagcctcctgagtagctgggactacaggcacccgccaccatgcccagctaatttttgtatttttagtagagatggggtttcaccatgttggctaggatagtctcgatctcttgacctcgtgatctgcctgcctcagcctcccaaagtgctgggattacaggcgtgagccatcatgcccggccacaatctatcattttttaaaaataagaatgaaaacttgccctatcaggcaaaatgtactgcaaatcctaagtaatactgtatttccagattaaaggcactactgcaaagaaaagtgtaaatttatttaataccaaatgtttcctaagtttactttttgcacaatgcacagacacttttgggacaatgtatggttaaaaactaatattctaccaacagctccatgctgctctagatcatcctgaaggaaaaagtaatgcaaaggatgctgggtctccaagtcccaggactggctgatagcctctcccagtggatagcaggtcctaattctcttcttcgagcagattctctgatttcagctgggccttcctgatgctctccaagttcagttgttgatattttcttttaaaaaagccacactgaaacaaaggaaggaaaagtccagttacaggccaaagatagccatctgtttcagaaaaccggcattctggctgttgcctaaatagcccctatattcctctgcttctcatacttactactcccttctcctaacttactctgaatctctcctggagagtccaatccttcaagacctctggtgctcatccctcaatcagaactgactccaccttcctctgaaccctgctctcccgagcagctgaacctttttaacttattttgcaaagcatgataatttcggctgtactggatctaatcttatttatgcaaaaatactcagtatagcctatgatgctgaagacagaaggagatcaagtacagcttcctacatcaagctcatcatctagtaggaaaaagagataattacaacacagtgtgatgactgccatttggaagggtttctagaagggagctcacagcaaacacacagaagccagcacagaggactcaggagtctctagaccgctttcagggaagacagtgagtgaagtgagcagtcatggagggcattcctgacaagaaaagcagcctacgcgtacgcagaggcacgaacctatttagggaatagtttgacttgttgggagaaaaaagcaaggtcaggtgcttatgcctgtaaccccaccacttcgggaggccaagatgagaagatggctcgagccccggagtttgagaccagcctgggcaatatagggagacctcatctccacaaaattaaaattaaaaaattagctgggtgtggtggcatgcacctgagtaacagtcccagttactcaggagactaagatgggaggatcacctgagcctaggagtacgaggctgcagtgagcccttaactgtgccactgagctccagcttgggggacaaagaccctggtgtttatttttaaaaaagaggctgggagtggtggttcatgactgtaatcccagaactttgggaggccgaggcgggaggatcacaaggtcaggagtttgagaccagcctggccaatatggtgaaaccccgtctctactaaaaatacaaaacaattagccaggcatggtggcacattcctgtaatcccagctactcaggaggctgaggcaggagaatctcttgaacccggggtcagggtggggggaagggaaggttgcagtgagccgagatcgcaccaccgcactcaagcctgggcgaaagagcggaactccgtctcaaaaaaaaaaaagaaaaaaaagcaacacttaagggcagagacgggtagcggacagagaggagaggatcttaaatagcagtagaagagtttgcacattaagacaggggaaggcaaggaaaagatttcaacaggggaacaacagtcacatctgttttaaggccttaccgttaaggcctcttccaagtaagttataaatgctggcctagggttgaccttccaggccctattgaactcacaggtaaccgaacataacagtattaagttctgggccttgagaatagggaggtaccaaagaaatatatataaaatcactctttataactcagagttttctcttttcagacagatactgttttactcatttgtctaaatgggggtgtgcagttgaaggaggagaaaaaagtggccacgaggccagggcagctgctctaagtcagaggttggctgtcctaaggagttctgtgcccaaaactagagcccagtcttccctcactgtgatgccatgagtagaactgaccttgaacaggatgaccagaatcacgatcaacaccagaagtccaccaacgctgcctttaatgatgataggcaaagaatggtacttctcatctttcaggaagacgacagtgatctagacaagacaaagagatcgcccaataaatcaggtgaagcaaacaaggaaaaaatcctacatgttattttaaggagcaaaatacgaggacttggcaacaacccgtgtattgatcaaagctgatgacagtaaagcaaaaagctagatattccctgatgcagcattttagatcatctaaaactatccaatcacccaaatacttcgtaagaaactattctggccccttatctagaagggctaggtctgtcaggagattatgaccttctgttaaagatgctctgacagcttgaaagagggtcccacggaatccggtctcaacacaggactgtgaggctgtcacgccgctacactgctctatgtccctgagccccgtgcctatgctctttaaaatgatgacttcctttaaatgatctccaagtcctttccaactccgttctgacggctctttttgatcttgcacagatccctaaaggctttggtaatacactttccccacataaaatatgacaaaagtactggtcttcccctcaccagactaaaaagtgtgtattacctaagggacataataaatgcaaattatatccatgtgtactacttgcagagctcagctattagaagtcatccgcaggttttgttttccaaaggctctcccaatttcgggagtctaatctctcttctggcagggctcagctagaaagttcaggagatgtccttcctgagacccaggtatggcccttccaagttgtggccagaggaagttcccaggacttaggtggggccagagagccaacaagacttctctgcctgcccagagcaacccttcacgtgtatgtttaagcaccaaggtcaggggtgctttggagaggtttctgtacggggtgaagggctggacaaacttacctttaaggcctcttccaattaagttataaatgctggttgacctaaagttgaccttccagtcctatttagctcataggtagctgaactaaataggagtgaagtcctaggctttgagaatagggaggtaccatagcaacaaagagggaggaagaacagaaagagggctggaatattctacaggagaaggagggggactcaagaccctgggtttgggaagtgaaaggaagtcccaaggtgactcgggaaacaggccagatgtgagtagaagaaatgtccctatttctcaaagccacctccctttatcttcttctaaacccacagattcccaaaagtgccccaaagatgcccaagtagaggttaagggagaagcaaggcaccgggtactactgtttgcagcaaacacggatgctggcctgcccaggggcccctctctccttttggattttattcaggaatcatcgttggtctcaggtgatcatgacacagctattctcctttgccagtgactgacatgagattcagatctcactaataagatgtaagaggatgtctcctgggagcttttggaaactgtttcatccctgaaaagggaaggcacatgaagaaaaatccaacatccttttgctactgacttcttgcttcctgttttgtatcctgccatgtgaaaatacagcatttggagatgtggcaactttgtgctggccatgaaggaatgcgtcccccacacggcagagtacaaggaccaaagaagccaggccatcgccccaggccggcctccctcactggataaacagcatatgcccttatgctgcatgagctggattttccctttcttgtggctgaaatgcatttggatacagtttgtttatactcatagagtcactgtaagtcaggggcttattgtcaggaactacttaacactttgcttaggatattggatttaaagaaaggaattttggggaatccatgctatagaaataaaagtatcagtaagtaagagggggaaacatacaaatttaaaatgtgcacataagaaacttaatagtaactcctccctgctgggggcatgggaagggagaaatgaaggaacaattatttttcatttggtaccattctctgtatggcttggattttcttgctattatttttatttgttaaaatctgggcagtgcaataatggggcacttctatttcttccgttttctgtattttccatttccctctattttctgtattagaaatacactacttagccggacatggtggctcatgcctgtaatcccagcactttgggaggtcaaggcgggcagatcacctgaggtcagaagttcgagaccagcctggccaacatggtgaaatcctgtctctatttaaaaaaaataaataaattagccaggcatggtggtgggcacctgtaatcccagctactcgggaggctgaggaagaagaatcacttgaactggggaggtggaggttgcagtgagccgagatggcaccaacggactccagcctgggcgacacagtgagattcttcctcaaaaaaaaaaaaaaaaaaaaagaaaagaaaagaaaaagaaatacactacttaaaaataaaaggaaatgttatattggcatgtctagagaattgctcctttctcctcctccagggaggaaaacagaggaccttatatttagcaatccagcatcactctcctgacattccctctagtagagaatcatgcctaactaaagagctcagagctcacagatagatcacctctgaagccatgtccaggcaagggtcaacaagaatgaaaacacagggtaacacacaaagcattcagtccacaaatcacaggcatcagtctgacttctagtcatacttttgcaaaaagaattccaagagttccagtatctagtctaaatcttataaaagatttatgcattcctgagtactgtttaatactataactaaacactgatacagcacactaagacagttactggatacaaaaaacaatttctcacttaggtaattcattttttatttatttatttattttttgagactgagtctcactctatcactgaggctggagtggagtggtgtgatctcggctcactgcaacctctgcctcccagattcaagcgattctcgtgcctcagcctcccaagtaggtgggattacaggcacccaccatcatgtccggctaatttttgtatttttggtagacagggtttctccatgttggccaggcttgtgttgaacttctgacctcaggtgatccacctgtctcggcctcccaaagtgctaggattacaggcgtgagccacctgcgcccagctgcgaaatttttttttttaatcaatccattttcaaatcaaagtatatactgcagattccagcctagttatttcaactcagaactcctcagcttaggcctcttaattgccttatttcataagaagctgactcactcaaaggtcacaaaggcagcgatggcagagccaagatcagaagtgttaaggctgaaaacaggaagagggcaacagaatgtctgtggaggtgctcaaaggttaggcacaattttccttgggcactactcagaagccagccaggaattaccttagttctgtggttctctgcattcagtccctcatatagagatttgttgaaagatatttcaccaaggatctgcagttcagttacatcttttagtaactagaagatggggaaaggaatgagggaaacaaaacatattttagacatgaactcactgtgtttgaacagccttcaccacctttccctttaaaggtattcctgggcttagttaatggccctaacgtacacaacactacataaagttacccaaacaagacatctgcagttattcttcaacttcctttttttttttttttgagatggagtttcgctctttcgcccaggctggagtgaagtggtgcgatctcggctcactgcaacctccaccccgtcaggttcaagcgattctcctgccttagcctcccgagtagctggaattatgggcatgtgccaccatgccaggctaatttttgtatttttagtagagatggggttttgccatgttggccaggcttgtctcgaactcctgacctcagatgatctacccacctcggcctcccaaagtgctgggattacaggcgtgagctgccgcgcctggccttttcttcaacttcttttcccttgtgccatccaaagtcagttcttgactgactgacttatttttgagacaggatctcgctctgtcacccatgctggagtgcaatggcatgatcatgggtcactatagcctcaaccttccaggctcaagtgatcctcccacctcagtctcctgagtagctgagaccacaggtgcaccccaccacactgggctaatttttgtattttttgtagagatggggttttaccatgttgcccaggctggtctcaaactcctgggctcaagcaatccacccaccttagcctcccacagtgctgagattacaggcatgagccaccacacccagcttattcattttatttaacgtaagagatttttcctttttttttttttttttttttttttttttgagacaaggtctcactctgttactcgggccggaatggagtggctcaatcatagctcactgaagcttcaaattcctgggctcaaacgatactcctgcctcagcctcccaagtagctgggactacaggcatgagccaccatgcgtggctaatttatgtatttatttatttttaagaaatggggtttcactatgctgcccaggctgatcttgaactcctggcctcaagcaatcctcccgcctcagcctcccaaagtgttgggatgacagatgtgagccaccacactcacaattctttttttttaaattatttcttgtatctgtccctttcttttccacccccattgctacttcttcagttgagacctcacaaatgtcacctggatcactgtaaaacattaaacttgatcacttgatcactagttcccactttagaataagtgatcagggaaggcctctctaagaaaataacacgtgtggccgggtgtggtggctcatgcctgtaatcccagcacttcgggaggctgaggtgggtagatcatctgaggtcaggagttcaagaccagcctgaccaacacgatgaaaccccatctctactaaaaatacaaaattagccgggcgtggtggctcacgcctgtaatcccagcactttgggaggccaaggagggcggatcacctgaggtcaggagttcaagaccagcctcaccaacatggagaaaccccatctctactaaaaatacaaaattagccgggtatggtggcgcatacctgtaatcccagctacttgggaggctgaggcaggagaatcgcttgaacccgggaggcggaggttgcagtgagccgagatcgtgccattgcacaacaagagcgaaactccgtcttgaaagaaagaaaagaaaagaaaagaacacctaggtcgggtgcggtggctcacgcctgtaatcccagcactttgggaggctgaggcgggcgatcacctgaggtcaggagttcgagaccagcctggccaacatggtgaaaccccctctctactaaaaatacaaaaattagctgggcgtggtcgccggcgcctgtaatcccagctactcgggaggctgaggcaggagaatcacttgaacccgggaggcggaggttgcagtgagtagagatcgtgccactgcactccagcccgggtgacagagcaagactccatctaaaaaaaaaaaaaaaaaaaagaaaagaacacctgagctaaatttaagaagaaaccacctacgtcaggacctagaggaagagcagtgtcaagcaaaggaacagcaagtacaaagtcttgtggccagaataatgctgtactggcgagctagaagaataggacagaataacccgattataaaaggggcagtgggagagaaaggcgagtactaggagatgaagttgaagaattaagcagagaccagatcaagtactgccttgctctggccatgaaaaaagtatggattttagtctaagtgtgctcaagcatcagttttgtttgtttgttatttttaataagcaggggaatggcacaatctaatgtctgctcttagaagacggatagctgttacgtgggaattatttgtaaagaatgtgggaaaagcagaggcaagaaaggcaggccgaaggttattgcaacagccctggcaagaaagggtagcttgaattacaacggcagtggaaatggagagaagtgaatgggtttaggatatattttggccctgaaatggcagggcttgctgctggaatagacgtggggatgtaggaaagaggagtcacaggtaatccctcgagttccttgtactgtaactggagtatatctccctcctgagggtagctaaggaacgggttgggacagagggttggttttttgcaccaaaagatctattttggacatggacatgttatgcaaagatgctattatctcttctaggggcgatgcccgtgagcaactggataatcaaatctggagcatttcagtctcaaacacctcctcagagtgatcccaggagatctctgcagccacggtgacattttctttatctgaagcgatgacacagctcactgaatgccattcttccacatgctggaaaagcgaggtctagtgaacacaattcctttccgtgcggaaagtctgaaatctttttaacacttcggacacagagcatcgtaaggtcccagaatagagggtgtgagcaatttcagcgctcacctcggcccaagcgaagctccagcgggagcaattgagacccagggacgaagctagggagggcctggcagcccccggcactggccggcaggggtaacccaggaaaaacagtctcctggcctctcgttacccgcttcaggccctccgccctcccctggcctctcgggacggccgcgcttacctgaaccgaactgtacgcacaagcgcgctcctgactccaggtgcacaccgtggaggcctgaaacgagagccatgaccgcgacgcgctgaacaaaccaagccgccagttttccgtcccgtcccggccccggccctggcgaggtgcgcatgcgcagggccgggagctaggaccccgcggcaggcgggcgcgtccgcgtcgcacggaagtctcgcgatgtttgcgtttgaacctcttggcgggtgccggccatggcggcttcgctcccgggacctgggagccggcttttccgcacatatggggctgcggacggcaggagacagcggcggccgggccgggaagccgcgcagtggttcccgccgcaggaccggaggcgtttcttcaacagcagcggcagcagcgacgccagcatcggcgacccctcgcagtccgacgatcctgacgatcccgacgaccccgacttccccggcagcccggtgaggcggcggcggaggcgtcccggcggccgagtgcccaaggaccggcccagcctgaccgtgaccccaaagcgctggaagctgcgagctcgcccaagcctaaccgtgaccccaagacgcctggggctgcgagctcggcccccgcagaagtgcagcacaccctgcggcccgctccgacttccgcccttccccagccgcgactccggccgcctcagcccggacctcagcgtgtgcggccagcccagggacggcgacgagctgggcatcagtgcctccctgttcagctctctggcctcgccctgccccgggtccccaacgccaagggacagtgtcatctcgatcggcacctccgcctgtctggttgcagcctcagccgtcccgagcggcctccacctcccagaagtctccctggaccgagcatctctcccctgctcccaggaggaagcgacaggaggagccaaggacaccaggatggtccaccaaacccgcgccagcctcaggtcagttctctttggccttatgaactcaggaacccctgaggattctgagtttcgggcagatgggaagaatatgagagagtcctgctgtaaaaggaaactggtggtgggaaatggaccagagggtccaggtctgtcaagcacaggcaagaggagggccacaggccaggactcttgtcaagagagagggcttcaagaggccgtccggagagagcatcaggaggccagtgttcccaagggccgcattgtgccaaggggaatagacaggctggagagaactagatcaagccggaagagcaaacatcaggaggcaacggaaacctctctcctccattcccaccgctttaaaaagggccaaaagctgggaaaagattcgttccccacccaggacctgactcctttacagaatgtctgcttttggaccaaaaccagggcttccttcagtttccacaagaagaaaattgtgactgatgtgtcagaggtctgcagcatctataccactgccacttctctctctggatccctcctatcagaatgttcaaaccggcctgtcatgaacagaacaagtggtgctccgtcctcttggcactcctcctctatgtatttgctaagccccttaaacactctaagtatttcaaacaaaaaggcatctgatgctgaaaaggtttatggggaatgcagtcagaagggtcctgtcccctttagccattgccttcccacagaaaaactgcaacgctgtgagaagattggggaaggggtgtttggcgaagtgtttcaaacaattgctgatcacacacccgtagccataaaaatcattgctattgaaggaccagatttagtcaatggatcccatcagaaaacctttgaggaaatcctgccagagatcatcatctccaaagagttgagcctcttatccggtgaagtgtgcaaccgcacagaaggctttatcgggctgaactcagtgcactgtgtccagggatcttaccctcccttgctcctcaaagcctgggatcactataattcaaccaaaggctctgcaaatgaccggcctgatttttttaaagacgaccagctcttcattgtgctggaatttgagtttggagggattgacttagagcaaatgcgaaccaagttgtcttccttggctactgcaaagagcattctacaccagctcacagcctccctcgcagtggcagaggcatcactgcgctttgagcaccgagacttacactgggggaacgtgctcttaaagaaaaccagcctcaaaaaactccactacaccctcaatgggaagagcagcactatccccagctgtgggttgcaagtgagcatcattgactacaccctgtcgcgcttggaacgggatgggattgtggttttctgtgacgtttccatggatgaggacctgtttaccggtgacggtgactaccagtttgacatctacaggctcatgaagaaggagaataacaaccgctggggtgaatatcacccttatagtaatgtgctctggttacattacctgacagacaagatgctgaaacaaatgaccttcaagactaaatgtaacactcctgccatgaagcaaattaagagaaaaatccaggagttccacaggacaatgctgaacttcagctctgccactgacttgctctgccagcacagtctgtttaagtaagctaaatgtatcttactgccccgaaatgagaggagactggtcttgaagcctctggtgctgtttcaacctccatccccacaggagggtggaactcccattctcacaggtttccagtcagcttttcaaacaagaattttgtttccaaatggaaactgaaatatttgttgaaatgtttaaatttgctgataacaaatgttctgaaagaagtaaactagccgggcacagtggcgtgcgcctgtagtcccagctactcgggaggctgaggcaggaggatcgcttgagcccaagagttcatatctagcctggtcaacatagcaagacccctgtctctatttttttaaataaataaactacatgtgaaaacaaacgtttatatttataaaccctcttttttttttttttaattttattgagacagagtcttgctctgtcacccaggctagagtgcagtggtgcgatctcagctcactgcaacctccgcctcccgggttcaagcaattctcctacctcagcctcccgagtagctgggattgcaggcatacaccaccatgcccggctaattgtttgtatttttttagtagagatgggggtttcaccatgttggccaggctggtctcgaactcctcaccttgtgatccacccacctcggcatcccaaagtgctgggtgattacaggagtgagccatggcacctgacctataagccctctttctaattgtcagcagagtcctttctgtaaattcctttccgttttttgagccttaacacttatgtagtctgagcaaaaaaaaaatgcccaggcttcagcttcatactgagcagagcctgttgcttcaggtatcaaggctagctttgggaaccagactacagatgagacaactgaaagcaaagaggctgaggcaaagcagagaccaaaaaagagtctcaggggagaagaagggaagctagtaagcaacttatagggggcagtgtaagaaatgtcacatgttacatcgctcacacagagaagcagaatttatcaattttcaaagggaaaatgtctctgtctactgacaaggttttaatttttgcttttttttttttttgagatggagtctcactctgtctcccaggctggagtgcagtggcaggatctcggctcactgcaagctccgcctcccgggctcacaccattctcctgcctcagcctcccaagtagctgggactacaggcgcccgccaccacgcccggagaattttttgtatttttagtagagacggggtttcaccgtgttagccaggatggtctcgatctgctgaccttgtgatccacccgcctcggcctcccaaagtgctgggattacaggtgtgagccaccgcacctggccaatttttgcttatttttcctcaaagggaggaaaactgacaggttgctttaagagctgagtgattgagagtccttctgaacaggacttcgggaatttactcctaatcttttcccatggttaacttgtcttcactctgtttctagaactctggtttttatacttgagactctgtagtcactgtggaaagaggtgtgactgataaagaactgcctttaaatacctgagtcctcgtcagcttcttcactgctacaacctggagacctcgtaatttggttgggacgcaaatttgcaactggtattctgctccaaagaggttctccccatgtacctgcaaattaaaatcagagtaggaaatcaaagctggtattgctttgccatctacagctttacaataataagtacttacatggaagaggaattctttgtggtgagaaagcccctggcctgtgttcacgtacattatggatggtctgcaattgacaggacatgcgtcagcccttgaggagtctttctcccttttttggagacagggtctcactctgttgcccaggctagagcacagtggaacaatcatggctcagtgtagcctcaacctcccaggctcaagtgatcctccacctcagcctgggaaagtgttgggatgacaggcatgagccactacactcatccctttttttttttttttttttttttgaggtggagtcttgctctgttgcccaggctggagtgcagtggtgcgatctcagctcactgcaacctctgcctcctgggtttaagtgattctcctgcctaagcccccaagtagctgagattacaggcgcctgccaccacacctggctaattttcatattttcagtagagacggggtttcgccatgttagccaggctggtcttgaactcctgacctcaggtgatccacccacctcagcctcccaaagtgctgggatgacaggcgtgagccaccgcacctggccttctctttttgaatgaactcgactgctttcaactgaatacattaggacagagggcaccagacctttaccaggaatgaggccgggtgcagtggttcatgcctatcatcccagcactttgggaggccgaggcaggcggatcacctgaggccaggagttcaagaccagcctggccaacatggtgaaatccccgtctctattaaaaattttttaaaaattagctgggcctggtggtgtccacctgtagtctcaactactcgggaggctgaggcaggagaatcgcttgaacctgggcggcagaggttgcagtgagccgagatggcaccactgcactccagcctgggcgacagagtgagacttcgtctcagtttaaaaaaaaaaaaaaaaggaataaaagctgaatgtcaaaatataaagtggtcgtagcgcagttggggtgaggtggaatatttgaattctgtatcgttgggctggttcattttctaattatccctcaaatggccttactcatcccctccttacttcccagtcccacagctgccttcttccctccacagcgtcatattaattcccttttgtagcacgactagttggcaatacacctcctttgatgaccacagtggggtttctgtgacccaaatgttagcaccctagagatcaatatcagagcctgggttctaagcaggctcctctcagaaggacagtgtccacattcatcctgaccaccagctccatctacgagagagagcccaaagctgccccctgggcgatggagtcacaccgctgctggcctcttgggagtactcacttggacagaactgcaacgaagccatgcctgaattgaagggtgtgggtctcgttggccaaagaccgtctttcattggaactaggaataagagtgttagttcatagcacacctgctttgtacatagcaagtgcttcttaaaaagggcttcgctctgttgcccaggcaggagtgcagtgttgccgtctcagctcactgcaacctccgccccccgggttcaagcaattctcatgcctcagcctcctgagtagctggaattacaggcgtgagccaccatacccagttaatttttgtatttttagtagagatggggtttcaccatgttggccaggctggtctcgaactcctgacctcaagtgatctgcctgccttggcctcccaaagtgctgggattacaggcgtgagccactgcgcctggctatttttttaagttccagggtacatgtgcagatgtgcaggtttgttacataggtgaacgtgtgccatggtgctttgctgcagctgtcaacccagcacctagttactaagcccaacacgcattagctattcttcctgaagctctccccaaccctgcccctcccacaggccccagtgtgtgctgttcccctccctgtgtccatgtgctctcactgcagaacaggtgcttctgcacctggctccccagggtcactgggagtcagataagaaaaggctctcagaggctgggcgcggtggctcatgcctgtaatcccagtgctttgggaggccaaggctggtggatcacgaggtcaggagttcaagaccagcttggccaagatggtgaaaccccatctctactaaaactacaaaaattagctgggcgtggtggcgggcgcctgtaatcccagctactcgggaggctgaggcagagaactgcttgaacctggaggcagaggttgcagtgagccgagatcacgccacagcactccagcctgggcgacagagcgagactctgtctcaaaaaataaataaataaataaaaggctttcagagataagcaattggagttcagaattgtctctagaagaccacacttagaagaatactgattttaaaagggcttctcagcctccacactattgacgttttgggccagttagttcttggttgtgggggctgtcctgtactgctctgcgtgatgtttggcagtattcctggcctctacccaccagatgtcctactgaacacccccctccccaagtcatggcaatcaaaacaggcacagcctctggtgggcagaatcacctccctttgagaactcttcccagcagcgttccccaccttaccccccaacacagaggtcttgcaggtaacatagctatcccaagctattccaaagctgagtgaacgagaaccagaactccagggctcattccaccaggctgtaccacagttttactttgtgtgtgaacaaaagaacattttcattatctctggtaacaagaagagaaagtcgagtccctgcagggaaacagatgccttctgtgggctcactggggtttcctttctccctgggctgtaagggggccgttcctctcacagcgtgcatgtggcagggagatgtcttccggggtcatagcctgactctgctgtgacccaggcagtacttacttggtgacagtcacagtgatgtctgctgtcctgtttggaaaggcattctcctctagctgccaaacgactgaaacatgagcctattttaaagggggaaaaatggtcagttgattctctctatgccactcacaattcagaccgctagctactcgtggaacagacctaggagacgattcctcagattttcacattcctcacatttttctaacacagcatgtttcctttcccttccttttttttttttttttttttttttgagagggagtctcgctctgtcacccaggatggagtgcaatggtgtgatctcagctcactgcaacctctgcctcccaggttcaagcaattctcctgcctcagcctcccaagtagctgggattacaggcacgcaccaccacgcccagctaatttttgtattcttagtagagacggggtttcaccatgttggccaggctggtctcgaactcctgacctcaaatgatccacccacctcggtctcccaaagtgctgggattacaggcatgagccaccgcgcctggccccgttatttcagttaagcctcaaatacaaatatggagtaagcaaggcaggcggcctcattccccttttacaggtgaagaagccacttcagagatttcccacagcacagagatgacaagggacagatcagggttaataacttttcgtcttggccgggcatggtggctcatgcctgtcatcccagcactttgggaggtcgaggcaggtggatcacttgaggacaggagtttgagaccagcctggccaacatggtgaaaccccatctctaccaaaaatattttaaaaattagccgggtgtagtgctgcacgcctgtaatcccagctactcaggaggctgaggaaggagaatcacttgaacccgggaggcggaggttgcagtgagctgagactgtgccactgcactccagcctgggtgacagaatgaaactccatctcaaaaacaaacaaacaaaaaaactttttgtctgacacgccctccatactacccacaacttcactctgcttcacggaggtgagcaggcagttcacctagggctgtgtactggaaagctctcgtccccatcaccccctactttcagagccagcttagccactgtaagcactgctggggacacactgcagtcaagcgaagcgcaaagctggaaccgagagattgagatgagaccaagatgcagaagacgccaactgcagggtggtgagaagagcgaatcagtccaaaccgactcacagatgacctcttgaggacggggtgaccaatcctgcagttcatgatcaggacagaagcaaccggctgagggtcatcacactgaatgtttggagagggaggctgttaaaagagcagatgacattctcttaaagagccaaacaaaacaaaacaaaaacgtggtttcctcacagcaattcagcaaacattcactaatttttctgcctgtcagacaccctgccaggagctaaagaaataaagtccacttggtccctgtcttcctcacaagccggacaggcagggtcagcagtagatccccgaggaatttaaatacaaggtcgaaggggtgcttctgtgagggagctgcagagaacagcagtggagaaatatgaattccaactcggaggaattcgtaaggtcttcctggggaaggaggcatttgagctgggccatggactgatgcaaatataacccacagcctggctggaaggccggcacacaccagcactgccacgtagccaccagggctccccacctggacccccgaggggcaggtgatgactgcagtgagttttcttaattctcccagggacggtccatccctagttcccctctagatgcctaggagattgttttttgcttttgttttcatttttttgagatggagtttcactctttcgcccaagctgcagtgaagtggcgcgatctcggctcactgcaacctccacctcccgggttcaagcaattctcctgcctcagtctcccaagtagctgggattataggtgcccaccaccacgcccggctaattttttgtatttttaatagaaacagggtttcaccatgttagccaggctggtctcgaactcctgacctcaagtgatccacccacttcagcctcccaaagtgatgggattacagccgtgagccacggtgcccggcctaggagattgcttcattcatataatggatactgtcctagcccaaatagcctaagatgaccggggacaaatctacagtccaacaaattcaaatttattgactcactgcaatgaggaaaactacactttggttttgtttgtttgtttgtttgtttttgagacagagtcctgctctgttgcccaggctggagtgcagtggcgcaatctcagctcactccaatctccacctccgggttcaagtgattctcgtgcctcagcctcccgagtagctgggattacaggtgtacatcaccacacctggctaatttttgtatttttagtagagacggggttttgccatgttggccaggctggtctcgaactcctgacctcaggtgatccgcccgcctcggcctcccaaagtgctgggattacaggcatgggccactgcacccatccaaaaactacactattgtgtgtatcactgaacaatggaaaaggcggttattaaaggactccagggaagggtggagttcagatgaaatgtaaataaagtcctgttttgatggtaaagcagggctgagtgtcaaggagtcagtcaccagcaggccagcctgtgaatcagacccagggcccgcttcctgggaaaccattaatatggagtagaaagttgacagacactgtatctgaagctctctacctcaggtggaaacagactcttctcttggtcaaaatgacttacactctccaggcaagagggataggggttcataattaccgacgtaactacttcaaacagcaaagttttctttcttgttttttcttttgagacagactcttgctctgtggcccaggctggagtgcagtggcgcaatctcggctcactgcaagctccgcctcccgggttcacgccattctcctgcctcagcctcccgagtagctgggactacaggcacccgccatcgcgcccagctaatttttttttgtatttttagtagagacggggtttcaccgtgttagccaggatggtctcgatctcctgacctcgtgatccgcccgtctcggcctcccaaagtgctgggattacaggtgtgagccaccgttcccggcccaaagttttctgatctgtgattttagagaataaaatttctcagtgcagtgatacttgtcagccacagggtgtcctcgggaaacagactgtttcctagtatctgtgtctgtatccagccttgggaatggcagggcagattttcactttcccagtctaagctaatttttactttctcagtgtcttagggcattagactcacttctctctcagaaccctggtgaagaaagggccgcacatagggagggtggcactgcagcagaatatggtgcctcgggaggcatggagccggactggcggggatttatctagttattaaccatctgttggttggaccaggaggaggctggaggcaggggtgccagtgagggggccaccacagaaaagcaggcatgcagcgagggaggggcgtgagggacctgtttccacagccaccgtcacagtcaccttttgcatcctcttcaactgcaggtttctggggtaattcaaggccatgcttgtcatgtaggaatcttccccggagttagttaggttaatgttcagggtcagctcctttgtgagacccaccaccaactcctgcctgcacagggtacagataaaaatgttacagtttatttcatctgtaaaaacctcaacgcaatacaataggacattcaccgaggctagagcgtggtgctgtggtgcaatgatcacggctcaccgcagcctccacttcctgggttcaagtgatcctcccacctcagcctcccgagtagctgggactacaggtgtttaccaccatgcccagctaatatttttcttatttttatttttttgagacggagtttcgttcttgttgcccaggctggagtgcaatggcacgatctcggctcactgcaacctccacctcccaggttcaagcaattctcccgtctcagcctcctgagtagctgggattacaggcacgcgccaccatgcctggctaattttgtatttttattagggacggggtttctccacgttggtcaggctggtctcgaactcctgacctcaggtgatccgcctgcctcggcctcccaaagtgctgggattacaggcgtgagccacccagcctggccaatgtgcagctaatttttgtattttttgtagagacagggtctcgccatgtggaggcgggtcttgaactcctgggctcaagtgatccacctgccttggcctcccacagtgctgggattacaggtgtaagccaccgcacacagcccagaatagcaccttcttaagtaacttcttagataagttgcctaaggaatacgtttagcttagacattcttcctctcaacataagcaaacagctggactgccacgcccatctcagttgttgcatgagatgacgataatagctgccctttatttagtgcttaccatgtgccaaggactgcgtctcacacgctcaaccctcatagtaaccctgtgaaatagtacagctactctccattttatagaagaggaaacagaagccaagacaggctaattacctgtcatcccaacactttgggaggccgaggcgggtagatcacctgaggtcaggagttcaagaccagcctggccaagatggtgaaaccccgtctctactaaaaatacaaaaagtagccgggtgtggtggcaggtgcctgtaatcccagctactcgggaggctgagacagagaattgcttgaacccggtagggggagtttgcagagggctgagatcacgccactatactccagcctgggtgacagcatgagactccatctcaaaaaaagaaaaaaaaaattagccaggtgtggtgcaggcacttgtaatcccagctattcaggaggctgaggcaggagaattgcttgagcccgggaggcagaggttgcagtgagccatgagcacactattgcactccagcctgggcaacaagagtgaaactctgtctcaaaataaataaataaataaataaaaggctaattaaatgcctggagtctagtagtccaaagaattgagagaattgtacccaaatcctctttctaccaccaattcactgtgaccctaggtgaggtactctatgacacaaattcatccatgccacaatatttatggggcactgctgtgcactggagaacagtgtgcataagacatactgtcctaccccgtttcttggcctcagcttcctacccacaaaatcattcagacccttcccattaaaaggctgtggtttaagacatgggtccacatgtcctggaaaagagggtcctggggatgtgtgaaagggtcctccagaatgctgaggtatcacagggacccagagtgcagaaccactctcagtagctgagattgacagaaaaacatattagcaataccgagaaaactgttttccatctgaaatgtccaaagatgagatgtgcagatctaggaagtatggcctcccaaagtgctgggattacaggcgtgagccaccacgcccggcctaggaagtaatgtgaggtgtgttttgttcccattgtttggttttggtttggtttttatcccagctgagaagaggctggattgactggagggagagacaggaagcagagacagagcctgctgtctccacccgagagatgatacatgcctgaaataaggaaacagtagtggatgcctggacacggtggctcacgcctgtaatcccagcactttgggaggtgaggcaggtggatcacttgaggccaagagttcaagaccagcctggccaacatggtaaaaccccgtctctactaaaaatacaaaaattagctgagtgtggtcacgtgcgcctgtgatcccagctacacaggaggctgaggcaggagaagcacttgaagccgggaggcggaggttgcagtgagccaagatcgcgccactgcactcctgcctgggtgacagagtgagaccctgtctcaaaagaagaagaagaagaaaaaagacaacagtagtggagaaggaaagaagtcagagacagtaaagcaaatgaaacgaaaaagaggcaggggaggggggacagaggagttaagggcaagttctgagtttctagctcaggtggctgagtggtgccggtggctgagtggtgccggtggctgagtggtgccattgactgagggaggtaacatgggaggaagacccaagggtggaagaagatgcgttcaatcggggacatgacaagaggtgcatataggataacaaagcagagatgctgacatgtcagctggacacacatcttagagctcaggcgtgagacctcagtgtcatcagaatattaacagcgttgcctaatctgaggcctagggaccgtctcagagggcccggaatgccaaaatttatgtatgcacatgtgatcttctaaggagaggggtctgtagtcttcattagattcttttggggatctatgtcctcaggtcaaaaaccactgagacagctggacaccgacgaccaggctcactagcgtttttgaaagagaagcgtttgcttgctatgtacactagggggcgatgtagggcaagccatgcgtgctgtatctctactacccccagtagctggctgggaggttggttcttggctgtaattaattccctgctggaaacagctgtgcctgcttgttagcctggattccagagcatttgaaagtcttcaattggtcctgcaaatgtctatgaaagggctgaccaggacttggggaactgcgttcttccccatatacggcaactccagccagctggccaacagaatcacaatacatacacaacactagtcgccaaggacgcttgtttgttttgttttgttaccctccccccctccccgtttttggagtcttgctctgtcacccaggctggagtgcagtggagcgatctcggctcactgcaccctccgcctcccgagtttgagcgattctcctgcctcagcctgcccagtagctgtgattacaggcgcccaccaccatgcccagctaatttttgtatttttagtagagacggggttttaccatgttgaccaggcttgtctcaaactcctgacctcatgatccgcctacctctgcctcccaaagtgctgggattacaggcatgagccaccgcgcccggcctggggggcattctaagaccactacatgtctaaacccacactcatgtgcttggcaacactgtcattctggaattcagtgtggtccaatagaacgtctgcagcgatggagacaggcggtatctgcgctgcccaacaccaccagccacaggcggccactgagtctttgaagtgtggctaatgtgactgaggaacaaaatgtttcattgtgattaattttaactcatgtacatgtaaacagctaagcgtggctggtgtgttggacagtgcagtgccgcatgctggggctgtggccctctttcctccctccgcctccattctgtcagcacgtgctacgtatgagctgtcactttaaactgttactcccgtcatggcccagcccacaccgcctctcacctgagtggttacaaagggagcaagtgccgcttctcttctcagctaagcagcaagaaggatcctgctaagctgcatgagtgtgtcactcctctgacttcccagctcacagcaaaagcccttctgagggcttaagaagccccatggcctcttcccccttcctccccttccctcattacaccccgccccactccactgcagccactagctcctcaccctgccccccacccaccaggcaggcttccaacccagggtacctgcagctgctcttcccttagacacccaaccacatagctcgttcccctacctcctccagtgtgtgccaaagtgtcaccctccgtgaccaccccattgaaaacttcagcatcagctgccacccaacactccttcccaccttccctgtgtcttcaacgttcatctcatcaacatggaatttacctacttaccatcttctccccctaagagcaccaggagggcagggatttttgtctgtgttgttcacagaagtatccccagcacctagagtgcttggcacaaagtagatggtccagaaatatttgattgattagttaatttggccaagaggtgggccgggaaagaggttacctctaactgaggtagaggtcagcctggctgtgaagaacgctgggttctgaatatagcattgtccgggatgtcaagagacccaggttcaagtccaccaaatggcctatgcagggccctcggcgactgagtctgcttcctaatctagaaagtgggaagacagatctctgtcttgcctcccttctggggtagctgaggacatattgagataataagtgcagaagccatttgtgggccacggggagaggggaaggggatgtgcagggtgtcctaatgaaggaattgcccaggcaagcgttcgggagaaggttaatcgaggaaactgacggctatgtccaactcactgagagacggtggtggccaactgtaattctgcgacacaaaacagcttattcttgcaggccttctcatagggcagctgtaaccagacagagagtcccgatcagcccaggctccgccttccccagcagccctgcctccggctcttctccttataggaagttttgggctgtgcctcctgctcaccctgagaagtgcagttacagggaggtgaggggtgcaggctgggattgtccccgaagagcagggactgtgacattcctgggtgacattcctggatctgtcctataacatgggcacactgtgacccagtcctttgaccaaggtaaaaactggggtgaccttcacggaatgttaggggtgcccatgacatttacatcatgcgaattcagcagcaacacacagctcacgactttgagcattcagggagcagacacctacgcgaagagaagcttccttagtcctttcggatataggcagaacagcccgggcaggagtgggggatgcctagccaaatatcgtcaaggtccaggccttggaggttccttcctcatggctagtcatctgttttttcggttgtttgtttgtttgttttcagatggagtctcgctctgtcatccaggctggagtgcaatggcgcgatctcggctcactgccatctctgcctcccggattcaagcgattctcctgcctcagcctcccaagtagctgggattacaggcatgtgccaccacgcctggctaactttgtatttttattagagaaagggtttcgccatgttgaccaggttggtctcaaactcctgacctcaggtcatccacccaccttggccttccaaagtgttgggattacaggtgtgagccaccgcgcccggcctggctagtcgtctctgtaagctaactatttcccttgcctacacataatcgactaattctgaaagccacatttcaaaaggccccatggaggttgaaaagctccagttcgtgtttttaaaaattccagtgttctaaagtagctgggtctgtttttgtattatgaaggaaggcagccagctcctcggctggagagcctctgcacttcgcacttctctcccggtggccacctcggcagctgtctgcaggtctgttcccacggcctagagggggaatgacagcccagggcttgaaagggaactttctacttcctgcggaagggggatgccatttgcagaagtcaaagcgtggcgctctctctaagtgggtcaacagtttcatgcagggttttttgttgtatttttttttttttttttttttttttgagacggagtctcgctctgtcgcccaggctggagtgcagtggcgcaatctccgctcactgcaagctccgcctcccgggttcacgccattctcctgcctcagactcccgagtagctgggactacagctgcccgccaccacgcccagctaattttttttttttttttgtatttttagtagagacggggtttcactgtgttagccaggatggtctcgatctcctgacctcatgatccgccagcctcggcctcccaaagtgctgggattacaggcgtgagcccccgcgcccggccttttgttgtatttttaatatagccacatagcctgatctcttccacccagccccagtgaaagagaatggggttaagccatctaaactcccagccagaacgcactctctggtaacaccgatgtgcctaataccacgtggttttttcctcacccattttatacggggaataactttttaaaaatctctttgccatagcataatagtcatcactggttaaggaaagacacataaagagatgttaagcaggatacaatcgcaaggcatctcaccataaaatgagacgtgcttattaatgacacaggcaaacagcactaggaatggacaagtccacattaggtgcctcctgagatggtgtactgagaaggacacactttacttctgtgatattcctgacaaaaatgcataacctggccaggcatggtggctcacgtctgtaatcccagcactttgggaggccgaggagggtagatcacctgaggtcaggtgttcaagaccagcctggccaacatagtgaaaccccgtctctactaaaagtacaaaaattagccgagcatggtgatacatgcctgtaatcccagctactcgggaggctgaggcaggagaattgcttgaacttgggaggcagaggttgcagtgagccgagatcacgccattgcactccagcctgggcaacaagggcgaaactctgtctcaaaaacaaaacaaaaatgtataacctgaatctaattatgaagaaatatcagacaaattgaggaacattctacaaaaggactggcctgtacccttcaaaaatgttaatgtcattaaaagacaagggaagactgagtgagaaacccttccagattaaaggagactaaagataaataactgtagaacgctatgaatgatcctggaccagaaccttttttttcttttgctataaaggacattaataggacaactggcaaaatttgaataaagtttgtaaattagataatagtattttatcaatgtgaatttcctgattttgattattgtactatgttaagacaatgcctttgtttttaggaaatatatattgaaggtttgtggttttttttttttttttgagacggagtctttctctgtcactcaggctggagtgcagtggcacgatctcggttcactgcaaccactgtctcccggggtcaagcaattctcctgcctcagcctcctgagtagctggaactacaggcatgcaccaccacactgggctaatctttgtattttttaaaatttattttattttttatttttttgagatggagtctcgctctgttgcctaggctggagtgcaatggcacggccttggctcactggaacctctgcctcctgggcaaaggattcaaatgattctcctgcctcagcctccctagtagctgggactacaggcccatgccaccacacccggccaatttttgtatttttagtagagacagggtttcaccatcttggccaggctggtatcgaactcctgacctcaggtgatccacctgcctcaacctcccaaagtgttgggattacaggcatcagccagggcgcccggctgacaaaagtttcttatgacactacccgcctgtctaagctgcactgatgggcaccaggaggagaggctaggatacaggtttggtggggccattcagcctgaaggccctggcagggcatgaacaggcaggtgtgccaaagggcatcctctctgcagtgcaagacacgacagctccagtctagctcccacaaggaacccccatcacagcgtcatcagagccgcttgccaagtgaggtccccaggatgcaatgtatgcatgtgcctcatgaaagatgtagcaagtgcttttgtgaacataaagacataaaggaacaagccccaggggcagatggagacctgcgttacccatgagtcctcactcacggggacacattaacaccatctcagggactcagtttcaccatgagtacggtgaggggcccaaatgccgtctgaagacattgcctcccaactccaccattcttggaagttaggggagcaggtggtttctgtgggataggctcttaagagggctgggtactggctgtgggtagagtcacctggaagatggcaaagggctcagtgtagcggtccaggatgggctggggatggtccgtctgtccctcaggggtctggagctggtagctgactttgacactggcattggagaagcagtcctcctcacagagctgtggggtcaccacggaaggcagggttagagttggatgtgggggagaagatgacaacaataatgctttttttctttttctttttttctttttttttttttttgagatggagtcttgctctgttgcccaggctggagtgcagtggcgtgatctcggctcactgcaacctccgcctcccgggttcaagcgattctcctacctcagccgcccgagtagctgggatgacaggtgtgtgctaccacgcctggctaatttttgtatttttagtagagacagggtttcgccatgttggtcaggctggtctcgaactcctgacctcaagtgatccacccgcctcagcctcccaaaatgctgggattataggcgtaagccaccgcgcccggcctcttttctttttttttttttttaagataaggtctcactcactctgtcacccagtctggagggcagcagcaccatgatggctcactgcagcctcaaccacctgggctcaagcaattcacccaccttggcctcccaaagtgctgggatttccaaatatgagccaccgcaccttgcaagaatactttctactttgatgtcatcataagaagaaataaacaataaaagtggtgagtcagaagtcctaagcatcttccaaataagccaggctgaagggacacgtccttcaagcaagctgccaagtgctttgggaaaaatctccttcattctactacggttttgtgtctatagctgctatggttcttatcccagtcacaaaggggtaaagaactggctcagacagaagggaagagtcacagccacacctgggtttatcaagttctttctcttttttttttttttttttgagatggagtctcgctctgtcgcccaggctggagtgcagtggctcgatcttggctctctgcaacctctgcctcttaggttcaaggttctcctgcctcagtctcccaagtagctgggactacaggtgcatgccaccacgcctggctaatttttgtatttttttttagtagagacagggttttaccacattggtcaggccggtctcgaactcctgacttcaggtgatcctcccacctcggcctcccaaagtgctgggattagaggcgtgagccactgcgcccaaccaaccaagatctttctcaaagcaacatggaggacatattagagaggtaagagagaagataaggagattgcttagcataccatttgccactctctttgtttaaataagcctttctgcccctataagagcctcaagcccatgggagaaagtgagcatgattctctggtagagaatgtgattaagcctttatttaaggaaggctgtagactttaatccaattaacaatcactttgggggtaaatgtgtattcagaagaagaattcatgcatttgtttattggaataaacgatccatatagatccaaagttcgagatcctgtcagggtttgagtcccgacatactttttttaccccatgtctctgggcacctttgccaggagtaaacctttctagatggtcgtttctatctttttattcttccttttagttgttcacttttttgatgccaactgacattcaggccctcggtcctagttattatcaggtgaggtctgataacgcatgccaagaacactggcattcctgagttattaccaagaaaaacgtcagcaatgacagcatctccatcttccgtgccattacgtggttcttgatttattattattattattttgagatggagtcttgctcttgttggccaggctggagtacagtggcatgatttcggctcactgcaacctccctcccctggattccagcgattctcctgcctcagcctcccgagtagctgggattacaggcacccgccatcacgcccggctaatttttgtgtttttagtggagacagggtttcaccgtgttggcccggctggtctcgaactcctgacctcaagtgatccccccgccttggcctcccaaagtgctgggatgacaggcgtgagccaccgtgcctggcctgttatgattattttaatcacctcatttgtaggtctgggtatgtgcccttcactgcatcacctcaaatcctttctcaatgacaaagacccctcctgactcccatccaaactccgtcacttacctctccctctgtgggcatgagcaggaggtcctcacaaagctgggatccgctgctccactccctcaggcagcccagacagcttcttacgtctgaacactgcagccgtctcctctgcttccccacatccacatccagcgtgaagttgagaagtgcctcgcggaggcctgggaatgaagaccagaccttcccgatgaggtggggatgagccagccgcagacagaaggcccccagcctgcctgaggttccttgtggcccctcctgaacagtgtccccatgcaggtacttccctgcggctggactcctgcgtcggtttttcaaagatatttttctcaccgtcttctgacacctgaccagggtctctgagtgctcccgccccaaacccggagcagcacattcccaggactgagtcagccttctttagggaaggagggctcgggaaggggatcgagattgaagaagaaaataaggaggaagagagacaacaaagagaatggagagggaaagagggactctgcggagaaaaaccccaggacggcacagctggaagcaccgtggagatcccggggccgcctctcttactgtacagaacagaaccagctcagctagggagagacacttgcccagcatcgcacagcccatcgagctctgtgtcctggaagggacaggtctgttattttcttttttttttcttttttctttttttttttcctttgagacagagtctcgctgtcacccaggctggagtgcagcggcgcgatcttggctcactgcaagctccgcctcccgggttcacaccattctcctgcctcagcctcccccgtagctgggactacaggcgcccgccaccacacctggctaattttttgtattttgtttagtggagacggcgtttcaccatgttagccaggatggtctcgatctcctgaccttgtgatccacccgcctcggcctcccaaagtgctgggactacaggcatctgtcaccacacctggctaatttttgtatttttagtagagacggggtttcaccgtgttagccaggatggtctcgatctcctgacctcgtgatctgcccacctcggcctcccaaagtgctgggattacaggcgtgagctaccacacccggccaggtctgtcattttcaatccccaggtggataatagcctgctgctttgggaaagccaccccaccccaggagactgctctctgactgtgggaggcagagaccatctcagagattgctcctgagagattaaacctcggggactgttgctgaggaatcgttccaggggggagctcttggatgagcagtaaatacctgggctgtgaaagccatgcccaccacctcctttctgggaacagtctcctaatgagtttcaggtaaggaaagagaaaccaggcctccaacaggtgatccaatcccacctgggccggaggcacatagtgaggagggaaggggagaagacacaagtcagagagaaagaggagggtgtgtctcagaagcccccgcacacacgcacacacgtgggcatggagaaatggctgcctttttctgagtcttttttttttttctgagacggagtctcgctctgtcacccagcgtggagtgcagtggtgcgatctcagctcactgcaagctccgtctcctgggttcatgctattctcctgcctcagcctcccgagtagctgggattacaggcacctgcccggctaattttttgtatttttagtagagacggtgtttcaccatgttaggcaggatggtctcgatctcctgaccgcgtgatctgcccgccttggcctcccaaagtgctgggattacaggcgtgagccaccgcgcccggccttctgagtcttttttttcagaaactcaacccttcaaccctgaggaagggccccagtgtccctcttcccaacagtgtcagctctaaaccccttctgagtgtggacataacctcagaccaccctttcttgaggcagtttgcatttaacaaacctggagactaaggagctaagctctaatcgagggatttcaagcaccaggacctcagaccaacacccacccaccccccgccccagtcctctttccctgccccttacagaagccaaaaaggaaagaccatcacaccaggcaggggtcagctggaccatttttttacctgactcagaggctgtggttacagagctgatttcaaaacataaacggacattcacgacgccgttgaagccgatgggcagtgcgctgggggtgaaggccatggagaccttcaggcgaaccacaggccgggagctaaacaagacagcaaagaggatgggagaagtgactgctcagcctctgggtcagggcctggctgattggttcatgcattcaatggttctctatcaaacatgcccacatccaggtgatccctgagtctcagggtacagtggggaaagagacaagtttctgctttggtgggaaagcagacaacaagcaaataaacgagagaaacagggagatactatgtattggcaaggctatgagaaaaattaaaatactgttggccgagtgcggtggctcacgcctgtaatcccagcacttgggaggccgaggcgggaggatcacctgaggtcaggggttcgagaccagcctggccaacttggtgaaacatcgtctctactaaaaaactcaaaaattagctgggtgtggtggcgggcgcctgtaatcccacctacttgggaggctgaggcaggagaattgcttaaacctgggaggcggaggttgcagtgagccgacatcctgccacggcactccagcctgggtgacagagcaagactccatctcaacaacaacaacaaaaatacggtaataaggaccgagggctactgagactgggtggtcacagatggcgtggctgatgaggaggcatttcggttgagatttgttaacaagaaagagccagctgtgtgaggatctggggaagagcactccaggaagaaagcacagccagtgccaagggcctgtggcaggaacacttttggtttgtttgaggagcacaaaggtcagcatgcctggaatctaattagtgagacagaggatgggaggaggagatgggaatggaggggcgggaagggccaggccacgaagagccctgtaaagccatggtgaggaattgggattttactctaaataggagccgtggaggagtttcaggcagcagagtgaagggatagggctgctgctgtgtggagaatggagcgcaggggctggaagcaggaaaggctgtggcagcagtgtccagggagtgaagacagtgcctgcactggtctggaggcagagccaactaagacttgttgatgtggtggagaggaaggaaaagaggcatcaaagatgacgcctacgttttcatcctgaattgctgggtggatgatgatgccatttgctgagacagaaagcctgagggcaggatagatttgggggaatgaagggtggggggagataaaagctctgtttttctttttttttttttggagacggagtctcgctctgtcgcccaggctggagtgcagtggcgcgatctccgctcactgcaagctccgcctcccgggttcaccattctcctgcctcagcctcccgagtcgctgggactataggcgcccgccaccatgcccggctaattttttgtatttttagtagagatgaggtttcaccgtgttagccaggatggtctccatctcctgaccttgtgatccacccgcctgggcctcccaaagtgctgggattacaggtgtgagccactgcgcccagcaaaagctctgtttttagacgtgttcacttcgggatgactgtgagcagcagctcagggaggtgctgggtagacagcaagtctgcagcttggagaggacgggacagacgggcgctccatgagctcatttacagccacgggacttgatcattcactgagggatggggcacaaaaactctgcaattcttggccaggcatagtggctcatgcctgtaatcccagcactttgggaagccaagatgggtggatcacgaggtcaggagttcaagaccagcctggccaacatggtgaaaccctgtctctactaaaaatacaaaaattagccgggcgtggtggcagacacctgtaatcccagctcctcaggaggctgaggcagaagaattgcttgaacctgggaggcggaggttgcagtgaaccaagattacaccactgcactccagcctgggcaaaagaggaagactccgcctcagaaaaaaaacaaaaaacaaaaaactctgcaatcacagccatcgctgagcactgtgctaaatactttgtatatattcgcttgcatgatcctcatagctctgggaggtaggtgctcttataattcctaggtaaggtcttagagttaaataacctgcccaaaggctgagagggctgagagctgaggttcaaacccagacgggcagactccagagcctgtgcccacaaccacggtgctggctccctccctcagtgcctaatgtctgcatggagctatttagagcagggcaaatgggtgaggctgggcctgggaccccagaaagcaggacagaaccctaccggaacacaaccgcctggcccagagtgcccacggtgatgtcggcaaggccgtcgccactaatatcaaagccaccagccatggacatgccgaagtactggagtcctggggccaccgtggaggctctgatccgctgtggaggcagaaacacaaggcgtggggcgagggaagggagggaaacggggcggggagtcctttcatgatctatcccgatcagcatcgcaggcaccatccagccccagggagccccgagtctagaaccaggaaagagggagcaagctttcccagaggaagtggcatttggatggagcctcgaagggcaggtgggacttgacaggggagagtaagggaaagagtgaggcatggggaaagagcagggccttctgagaagcagccagggccagggacggggtggaccacaggggattggggtacaaggaggcttgatgtggggcttggggatggggggtgtcaacaaaggttctgttgttttgaagtgacataatcaggataacactttagaaatggcactgaagacatggggtggaagatggagaggaggaggaagctgggtgggctgggagtgggatggcaaggcctgagctgggaccgcaggggtggggatagagagaaggggctggagttgggagacagctagaatcatgaggacgtgggaactgacaggctgtgcaggctgtgagcgtgctgaggactgtctgaggtttccggtgtggggtgtggagggggatgaggtctcagaggagcatcagttctaggggaagcaggtgctctcagatgggccgtgtgggagtgagatgcctgggggccatccaggtggaggtgctcatgaggagctggaggtgggtggaagtgcctgttaatacatgcagtgtgagaggctggcaagggagccctggggaatgagagataaggcgcggaggtgctgggtgggagacaggagcgagggacagaaagagaggaagcagggacccgaggcaggtgggtggaaggagggggtataggccagggaaggagacaggtaccgccacaacctcccctgaacctgaaggggccgaggtgaagccctggtctggaacctccccccaacctgaaggggctgaggtgaggccctggtctggaagctccccctagcctgggggacttctttctttcactgggcattcccaacccccgagacctgcccagcacttaggactgaagccgacttggggcttgggtcatcatatctgagagaggtcagagccccagaggagaggaaggagagggccccatgggtcacctgcgaggggctggcggagaggccgtcccagtgtccattgtagatatacacactgccgaagctggcaccatcatctgccccaaaaccttccaggggggccccgatggccacatctgtgagcttatcctgactgagatcccccatagccgccatggcaaagccaaagcgggcattggtgaacccggggtgcccactcagtatgcgtgccaaggagaaagaaccatcctgtaaagcaaacaaacagctcagccctcaagaaggggtgctaggtgcccactccattgccaccccgatgcacgctcactgggccggtgggtgcccactccattgccacccaggatgcacgctcgctgggccggtgggttcccactccattgccacccaggatgcacgctcactgggccggtgggtgcccactccgttgccacccaggatgcacgctcgctgggctggtgggtgcccactccgttgccacccaggatgcacgctcactggccagggaccttcccaaggccatacagtgagcaccaggggaaagctggggtcctcctacctggaagttcaggagtcagagcccgcccccctctagttccatgggcaggggtgcattgctgcaaatgggaggcctgggtttcactcgtggctctgccacacacatgccaggtacacttgagcaagtctcggcatcactgaggctcgccgagccccagcttcctcacccgtaagatgagagtggcagctacctcccatagttactatgagaaacaagtgagatcctggactaaacgggctttgccaaccatgcagctgtaagagatgttatcagctgggcgcggtgactcacgcccataatctcatcactttgggaggccaaggtaggtggatcacctgaggtcaggagttcgagaccagcctggttaacatggcggaaccccatctctactaaaattacaaaaattagccgggtgtagtggcacatgcctgtaatcccagctacttgggaggctgaggcaggagaatcaacccaggaggtagaggttgcagtaagttgagattgcaccattgcactccagcctggacaacagagtgagactcagtctcggaaaaaaaaaaaaaaatgctgggcgaggtggcttacgcctgtaatcccaacactttgggaggccgaggtgggtggatcacctgaggtcgggagttcaagaccagcctgaccaacatggagaaaccctgtctctaccaaaaatataaaattagccgggtgtgtggcccatgcctgtaatcccagctacttggtaggctgaggcaggagaattgcttgaaccccggaggcagaggttgcggtgagccaagatcctgccattgcattgcagcctgggcaacgagagcaaaactccatctcaaaaacaacaaccacaaaaaaagagatattagagatattatcatcaacgatcacccttgggtaagaaagtgggtgcggagagcgatgccgctgccccgcccagccgccatccagcctgagcacctccccatcactgcccactggtgccaggcagggccagggcactcccagcctccatcacctctgtgtcaggctgagtgccacagcctcagcaagctcatgaagatggagactctcccacctgctcgctgagacggtacacgtagactctgccttcttctccatgaacgtggtaaaatggagcagccaccagcaagaagtccgtgcttccatccatgtcaatgtccacagggcacagctcagagccaaaataggaccccatctacagcccgggaggaactcagctcaccaggagccccgctcctgcacccctcagcaaggctacacccctgcccgcgtgcttcctggaccacccaatttgggtcgttacatatcaatttgctcactgagagtaacagaagagtggaggagcagcccaggccccacagcggaggaaactgcctagcaatcagacatgcagagctgaagcagagccctcgagctccactcaggagcctgagtttcacccagcccgggccctggcccactgtgcaccgtgggacccactcctttcccttgggggcctccagattccccatcggtcataaggggtggaggctttccccagcaggtacctgctctccctccagcactggcaggaagctggcctctctgccctccttctggagctcaaacacggccccatgatgtttgtaccgtggagcccccgcgatgtaggagaggctgcaggtcttgtgcagcacggccacagcgtaacctggggcaagggtggtgtggctgtgaacacaccgtgtgctcccacctggcctctctcttggccccggcaccttcccagtcaggccttcaaagtggcctggggaggggggcaaaataggagagactgtctttctcactatgttaaaaatcggcatcagcgagcactctcactttgccagtcacacacatccccatcacacagatatgatgcacacgctgtctgtcacgtatgcagctttgctcgaaatactcgttcgcacacattcactacccacgctcccacacacaccctaggaggacggagaagaggggtgagaggacgcccaccactattattatttttatttatttatttatttatttttgagacagagtctcagtctgtcgcccacgctggagtgcagtggcacagtcttggctcattgcaacctccccctcccgggttcaagcgattcttgtgcctcagccttccgagtacgtgggactacaggcatccgccaccacgcctagctaatttttgtatttttagtagagacagggttttgccatgttggccgggctggtctccagacctcagatgatccgcccgcatcggcctcctgggattacaggcgtgagctactgcaccactattattaatggagaggccccgccctcccctgggtggctgctgtgcctggtgtgtacctgacaggccttgtacctacccaggaggctgtagtactcagcctcacggtccctaaccaggacccgcccctcggcccatgtgactgaccaggtcccgcccccatccggaaacctcaagtgcagcctaatgcgcagcctcggtgtccccatctcggccccgccctcgcccaggtggcctctaggccccgccctcacccaggtggtctccaggccccaccctcctcacgtaacttccaggccccgccctctcccaggtagcccccaggccccaccctcgcccacgtggcctccatgccccgccctcacccaggtagcccccaggccccaccctcgcccaggtagcctccaggccccgccctcacccaggtagcccccaggccccaccctcgcccaggtaggccccgccctcgcccacgtagccctcaggccccaccctcgcccagggagcctccaggccccgccctcatcaggtggccccgccctcatcaggtggccccgccctcacccaggtagctgtactgcgcagcctccgcgtctgccgccgccgccgctgtctggttcaggaagcggccccggcggctgcgtgtgtcgtagagcaacgcccctccggaccagtcaaaggccccgacggcgccgagcagcacctgccgctgaaggggacggggatggggcccagatgagtgggagggacccaaggccgggccacggtggccgcgggtctccgggccagcgcggctaacctggctgggagcaggggggcgttcggtggtctagtgcccgcctggccagagatgcaggcgggaaggtgagatggccaacactgggctcctgcctcgtgcccttgcactccctcctccgggagaagcaagcagcttggttgataagctgacccaggccgagtcctgttgcctggtctgtattcaggggaacaactggatgtttgagcacacagaaaaaagcgacctcctgtcatcaatatggccacccttttgttgcagtgagccgagactgcaccgctgcactccagactgggcgacagagcaagactccgtctcaaaataaataaataaattaattaattaaaataaaatcgctcttttacaggaatcaccacaggtagggcagagccctggatgggaggcaggagtccctgaatcctaggtgtcctgggcccctcaccaatgggcaagcctgcctggtgctgagtcagccacgtacctcatccaggatctgagcactgaagccaatctgtgccagctggtagtgaagggcgtctccaaccgtgcctgcaagccaagaagcccagtgagactgctgtgggccgaggtgaagggagaaactgagtcaggggacagtccagcttggcctcactcccagaaggaaccatgcttggtgtaacaggaagagaacccggctgagggtagagacccaggttctccttgagcaactactatctgggcagttcactctttctaggcctcagtttcctcgtctgtgagctcctgggagaagggactatgccccagccatccttgtttctccagcaccagctcagttcatcagagcttcatggagattctgggacgcaaggaggcctggggatattgttggcctttttttttttttttttttttttttttgagacagtgtctcactctgttgctcaggctggagtgccatggctcaatatcagctcactgcaacttgtgcctcccaaggtcaagtgacctggtgccttagcttcccaagtagctgggaatagaggtcatgcgccaccacgcctggctaatttttttttttttttttttgagatggagcctcgctctgtcacccatcctggagtgcagtggcgcgatcttggctcactgcaacctctgcctcctgggttcgagtgattcttctgtctcgggctcctgagtagctgggatcacaggcatgcaccaccacgcctggctacatttttttgtatttttagtagaaacaggatttcaccatgttggccaggctggtcttgaactccagacctcaggtgatccaccggccttggcctcccagagtgttgggattatgggcgtgagccaccacacctggccccagctactttttgttttagtagagatggggttttgccatgttgcccaggcgggtctcaaactcctggcctcaagcaatccacctgcctctgtctcccaaagtgttgggataacaggcatgagccaccacacccggccattgcctttttagacatggaagagctgaggttcagggagatgatgggagttgctcagagaaaccacatgaagatgggacagaggccgggctggagcataggctcgggcctcctgcggtggcctgggtcccggagccctcaccttccatgctgatgatgttgtaccgcagtttgctcagcagcccatccagcgccatgtagttggtcaccttgaaagcatgggtctcatccgggtctgaggcgatcaggttcagttccctcgcagtcctagcactcttaaattcttctcccacctgcacagacagcctgggtcagcgagtcagcgctgcgtggattccccaggcccagggagagagctgagcccctccatctggcctctggggccctccattacctgtctccttccttcctttctcctcctttccctgctccctgttctacccatactctgggcaaaattccagttttaccaaagtacacctgttctcctgaatacaccaagctcctcctcacctctgcacatgctgttccctctgcctgcagggcccctctctgcctcccctgtgccctaggccagctactcccatttgtctggcaggactcagcttggcaccgcggtcctccaggaaccctccttggtgtgtttcctgtggctctcccaccactatttggccagtaagctgtgaccaccatggggaaatgagccctctctgggatgacagagcatggagagaagaggagcatttgcaaatagaacagggtctggataagctgcttacagaaaagcccccatcgacaaccctggcttctccccaccccaggctgtgcaggttcaggaggtgtctcccggctcctggctcttaccccaatggcaaagcgctcaacaccctgcattttgggggagttgatgactgtcgtaaggttgagggggtcctcgaatatgccaccatcggtgagcaccaccatgaccttggatgcctttctcctggagccgtggcttgaggtgaagatgctgtctctaagcaggggagagtaaatgaagaagagagctttgccagaaggatgaccgagctccaggagagactttattctctgacctgtattagaattgggagggttcacaatcctcccgaaagacccagagaagggggtgatgcccccttaagtcacgcagcgaggctgggcagagggagggctgcaacacaggtgttcttgcttctcacctgctcccagcaggaaggtactgcctggcagtccattcctcttgtgtgcgtacaggaagactcatgatattaaaacgatagataatactcacatggcacttatcatgtgccaggcactgttgtaaacactgtatattttaagccatccaaccatcacaaaatctatcaggcaagtgctattatttttctttcttttttagagacggcgtctcactctgtcacccaggctggagtgcagtggtgtgatcatggctcactgcatccttgaacttctgggctcaagcaatcctcctgcctcagcttcctgagtagctggaactataggcacaagccactgctccaagctgtgagtactattattattctcattttatttatttatttttattattattattattgagatagatggagtctcgctctgtcacccaggctggagtgcaatagcacgatctcagctcactgcaacctctgcctcccgagttcaagcaattctccctgcctcagcctcccgagtagctgggattacaggcacctgccaccacacccagctaactttgtattttgagtagagacggggtttcaccatgttggccaggctggtcttgaactcctgacctcaggtgatccacctgtgttggcctcccaaagtgctgggattacaagcatgagctaccacgctcagcctatttttctcatttttaaagtgaggaaactgaagcacaggtcacaaggtccttcagtttgcccggggtcacacagatacaaaccagagctgaggccgggcgcggtggctcacgcctgtaatcccagcactttgggaggccgaggcgggcggatcacgaggtcaggagatcgagaccatcctggctaacatggtgaaaccccacctctattagaaatataaaaaattaactgggcgtggtggtggccgcctgtagtcccagctactcgggaggctgaggcaggagaatggtgtgaacctgggaggcggagcttgcagtgagctgagatcgtgccactgcactccagcctgggtgacagagcaagactccatctcaaaaaaaaaaacaaaaaaaaaaaaccagagctgagatttgaacccagccagcctgtccactgagcactctgctctcctgcatctcacaagaggaagtctttggaagactttttggaggacagccttgaggtgtcatccctcacgttctctctcggccagggaaaggctggagccctaattctcttctcctgcggttctggccagccacttcctccatgagtgatgccacagagactctgggcatggccagaataattcctgcagcccccacactcacaagacgtgttgcatggctgaggcagtcttggtgacactccccacttgagtgatgttctggactctggcgagggaggccatcacatcctggctgtcccgaaggtcaaactcagtctggatcactcctccatactgcaccaaggcaaagttgcactgcaggggatgggcaggagggcaggaggttggaagaattgccacctctgcccctgaaatgtctcccgctggaagcagcagaaaaatccactccttctaccttatccctgggcagaaagagatgctaaggcagagcaaaatctctaagcgagtaggggtggagaagggtgcgatagtaaaggcccccagtgaatcacagacttctccccagctccctgtgtagtgccctccatactgacgatgggattggtcatgtgactggctttggccaataagacatcagcaaatgtgatgtaattagagacttgaaaaatacttgcatgcattggatctggccctcttagaatgttgctgccacgaaaaagttgggctggcctgctaaagacacatggtccagacaagtaagtgaggtcatcttaggccatccagccccagtcaagcaaccagacgcctgcagctccagggtaactccaggcaagatggacagaagaatcatccagctgagcccagcccaagtatgtgacccatagaattgtgagcaaatgtggtgattgttgttctgaggtagggtgattctcagcaatagataagtgttaaccagctcttagggaagcccacctcaaaacacttttcatagaagttcctcatcatgttggagatgaagtctttggctctctgaaagtctgggggatcaatgcttcctgagccatccaggatgatggcaatctcggtgcctggccaagacaaacaggtcaggagtgggcatgggatgtgaggcagatgtaagggtagcatgtgtagggcatgcacccccactgcagccctgacaaccagctcagttcagggaagaagttggagaagctcccaagagggaagctttttttttttttttttttttttttttgagacagagcttcactctgttgcccaggctggagggcagtggtgggatctcagcttactgcagcctccgcctcccgggttcaagcaatcctcctgccttagcctcccaagtagctgggactataatgcacaccaccatgcctggctaatttttgaattttctagtagagttggggtttcaccatgttggccaggctggtcttgaactcctgacctcaagtgatccgcccacttcagcctcccaaaatgctgggattacaggcatgagccacctcacctggccccaagagagaagcttttgtctcccccttcaaaaagagagctagaacctggtcaggctttgtgtgctgtgtgagccattcccatcactaccactctctgagcctcagtttccccacttataagaaagagtgggtggagctggtacaggtcaggtctgtaaagtccagccactgctccccatctctcagactgaggcacccctcacccttggaggccaccagcctaggaattggctctgatagactcagagcaacccagatctgcctcttctcaccagcttcctcctcctcctcgtcttcctcctcctccttgtcttcctcctcctccttctccagagcccggcgctgcctggctgtgttcacatcgtcttctccaccgccttctttgttgctgtagcagtctccagtgtccacacgtgcatctggatccaggagattttctttaaaaacacacatggaagagctcagagtcagaaaggctccatcctcgcctgagcacgctcacacatggttctgccctgattcctttcacgtgatgcctcaaccctgccttgctccactgtgggcctgcgtcccactgcatctgccgtgagctggtgccttttcttggagaccaaggagatctctttagagctatccaaggccagtgaatgtccaatccttaccaaggtcgaagaagttggcctgagcctggggacggaggtcagggcccaggaggctacaggtgcctgtgagttctgagctgaggctgtgaggccgccggaccagcacttgaatgcatatctgtgggagggaagagagggtggggaaacaccaggtcacctcccgattcccgagccacagccacattctcacccccattccagaactcagtggctcaaccaggcagggggcacaggaagagctggcccacccctcaccgggtgtaggagtcagtgttggcatcaaggccgaggccgacacctgcaggagtgtgctgggtcacagggaatacctaggtcagccctggtatcagggtggtcagagctacagtcagccctggggttggcaccagggagacgctagactcagcctcgggaacagcatggcagtcagaactggtctcaacaccagggtcaaccacgagggctagcaccagcctccctaaggccctccctcctctcgctcctgcactcaccaaaacaccgtggtggctccggacaacggtcactccccggtgcctccccttggggatggggacatgctctgaaaaagttaagcccaggtgaggaggaggaggggactctgggaggcagagacccgaagccaaggtcagagggcacagagccaccttggtcaggcccccatgaggaactgttggccactcagagaagcctctagaaagctagagcgggggccttcaaggtcaggactggacacgttcagggccgagtgcccatccccggggctcatttgctgaccctttcaacacgtgcccattgacgtctgctctgtgcccagccttgtgagcgtggtgatgggcgtccagcaacagcggatgcctgctgcttttcctcagtgggtttggtcgggcaggtgggtggagaagcactgcctggtgggtatgtaagtgccaaggaatgtgcaagataccgtgggactggctgtgtggaccaaggaaccccccagcctcacagacccatcctggggaatcttactgcccccagcctcaggggcagaaatggtagctccttcctcgtcctccccactgtcagcctcaggatactgtcttatttttcagtcatggaatcactcagtcaaccctgctggactgagattgagtctgttcaactcagtgcctctcagacaaggattttttttttttttttttttttttttgagacagagtcttgctctgtcgcccaggctggagtgcagtggcgcaatctcggctcactgcaagctccgcctcccaggttcacgccattctcctgcctcagcctcctgagtagctgggactacgtgtgcccgtcaccacacctggctaatttctttttgtatttttagtagagacgggatttcaccgtgttagctaggatggtctcgatctcctgacccatgatcggcccacctcagcctcccaaagtgttgggattacaggcatgagccaccgtgcctggcaggattttttttttttaaacagtcttgctctgttgcccaggctggagtccagtggtgcaatgtcagctcactgtaacctccacctcctgggttcaagcgattcttctgcctcagcctcccaaatagctgggattgtaggcatgcaccaccacgcctggctgatttttgtatttttggtagagatggggtttcatcatattggccaggctggtctcgaactctggacctcaaatgatctacccgccttggcctcccagtgtgctaagattacaggcgtgagccacggcgcccagcctcagacaagacaaggattctatttatttatatatatatagccaagaggttgtcagtaaatctgtgacctgagtttgactgggtaggatggatagagtttaatgagtgaatcaggttcattcattcattcattcattcattcattcaaatggcatttattgagtacctaatatatgtcaggccccatgctagttactagggtggccacagttagactgaatatgtagggggtgaattgcactgaggtgtgatgacttgcatcaggaagggctagagtttcgaatcagccaccaacactaaaagtgtgaactttgtcatactggcaaccaaaagacctacattctctgaactgtagcttcctctcttataaatggcgcggttttgaggatgaaaacagaatgactcagaggactgccgggcacagggtgggcacgcaatacgctgtaggtatcatttctgttgctaggactgtgtcaggaaaggtggctggggattaggattgggttggggtgggactgggcattgggatggaatcttgctgtgggttatgctggagtctaggggtgaacgggctggatgaggcagggctggggttggaatggtttgagtttagatgagggggattttgctagaaagggggtcctggggagcattccctggagttggggctgacttacctacaggatggcaaaggatttcatcctggacaagggaacatcgatggaggggccctggtgtcctcttggttctggggctggtgaccaggagcctgagtgggaggggaggttgcaaagctgagctggctgatgttcctcgtcttctccctgcctgcccagcacccttcccattccagttgcctgcactcacaagctccctgtctggccggcagattcctagcccagactctggattatggggaagacatttgcccaacctctgcttctacacagcaccaggcaggaaatggttaaatgcaacccctctctgcctgctgcccaccctgacaaagaaggggtgatactgatggttaataaaaactctgctctcttatggggacagggatggggaggccagaaaaccaccagcgttggggttggttctgttgggggcagtgctggcttcctcgtgggccacccagggggcctgccctgcctggccttagttcctgagaagagtacgctggtgcccctatcctgtgggtcagtcagaactggaggtttggaggccgggcgcggcggctcacgcctgtaatcccagcactttgggaggctgaggcaggtggatcatctggggtcaggactttgagaccagcctgatcaatatggtgaaaccccgtgtctactaaaaatacaaaaattagccgggcatggtggcgtgtgcctgtagtcccagctactcaggaggctgaggcaggagaattgcttgaacctgggaggcagaggttgcagtgagcggagatcacgccactgcactccagcctgggggacagagtgtgacttcgtctcataaataaataaataaataaaagaactggaggtttgggggtggctgcctcagcctgattaaggcagcctcaagagctgcgcctcctgactgcaaacttcttgcccccacccaggcccagtccagggagacggcagattccagggacagcctcaacattctcaccatccacgttacccaggagaactgggctgtcctgagacagacagtgagctccgggggttgtcataggggatggtggggaggggacgaggggcttggtggttaacagtgaaccaagtccaaggtctttctgcagagggcagtagaagtcatggaggactttataaaggggaagcacatgattagctgtgctttcaaaagctcatgatgaggccgggcgcggtggctcacgcctgtaatcccagcactttgggaggccgaggcaggcagatcacgaggtcaggagatcgagaccatcctggctaacatggtgaaaccccgtctctactaaaaatacaaaaaattagccgggcgtggtggcgggtgcctgtagtcccagctactcgggagcctgaggcaggagaatggtgtgaacccaggaggcagaggttgcagtgagccgagatcacgccactgaactccagcctgggtgacagagcgagactctgtctcaaaaaaaaaaaaaaaaaaaaaaggtcatgatgtggctacagtgggttgggacagactaaagagcacaggaaggtggggcagaaatgagataccgtctccacttcctcaactcctatcactctacattttaatacattatgaaatatattcacgtatcggcatggcttacagaataataagaaagtctgcacctgtgcgtccatccgcccacccacaactgaacccaccccaagctgacttcccaccctctgagtcagttcctgtgaaggtcaccaggggcccccacaatgccacatccaacggaccgctctctgtcctcatcttcctcaacctctcagaagccccaaacatgagtaaccatctccttcgaacacttttttctagatttctgcctactctctcctcattcctcaaggcttcgctggtgccttcgcggtctgacctctatctgccaccaggatctgggggctgggtcactgtcttccttgccggcacactctccctagtgatcccttccaagcccatggcttcaatacacctataacggctgaaattcccacctctccatctgctatcgtaggcagaataatggccccccaaagaaggccacgtcctaatccccagaacctgtgaatatgttgccttttatggcaaaagggacttcgtagatgtgagttaataaattaaggatcatgagatgggggggttatcctggattatctaggtgggctcagtgaaatcacaagggtccttctatgagggaggccccgaaaacggtggcatgggcgagccgcagggactcagggggacgttgaggcaggcagaggggagaagtggcgagactgcagggaatgctgggagcctcccaaggaggcctctcccatcccagaagcccccagggctgtcctggctgggctgtaaagccccagtgtaatcacaaaagtccttctaggagggaggcaggagaatcagagtcggagaaagttgtgaagcttgctatgctgcaggcctaaggaggaggaggagcccgtcagccaaggaatgcaagcagcttctagaagcctaaaaaggcaagaaaacagattctcccccagagcttctagaagggacccagccctgctgatagcttttcagacttctgacctccaaaactacaagataataaacttgcagctgggctcagtgtctcacacctgtcatcccagcactttgggaggccgaggcaggcggatcacctgaggtcaagagttcaagaccagcctggccaacagggtgaaaccccgtctctactaaaaatacaaacattagctgggcatagtggtgaaagcctgtaatcccagctactcgggaggctgaggcaggagaatcacttgaacctgggaggtggaagttgcagtgagctgagatctcaccactgcactccagcctgggtgaaagagtgcaaaataataataataataataataataataataataataataataataataataataaacctgtgttgttgtaagccactacatttgtggtaacttgttacagcgtcgataggaaacaaacagaacctgtggtctttcctgtcaagcctgcttcttctcatcttccccgccacagcaaatggcaccagcaaccactaagttctcaaggcaaaacccaggaggcatcctcacttcgtcgtgttttcactcatgccctacatccaatccacctgccaaccctgttggttctctctccaaattcttttttttttttttctttttttgagatggagtttcactcttgtcgcccaggctggagtgcaatggcacgatctcggctcactgcaacctccacctcctgggttcaggcgattctcctgccttggcctcccaaagtgctgcgattacaggcgcccgccaccatgaccagctaattttcgtatttttagtacagatggggttttcaccatgttggccaggctggtcttgaactcctgacctcaggtgatccactcacttcggcctcccaaattgctgggattacaggtgtgagccaccacacccggccaatttttgtatttttagtagagacagggtttcaccatgttggccaggctggtcttgatatcctgacctcaggtgatccacccacctcagcctcccaaagtgctggaattacaagcatgagccaccgtgcctgactctccaaattatttctagaaagcaactcttctccagatgctccttccatcatcgtcctgccttgttgatggtaatagcctcctgttattttgtggggtttgtttgttttttaggtagtgtcttgctctgttgtccaggctggagtgcagtagtgtgatcacagctcactgcagccttgacctcccgggctcagcaatcctcctacctcagcctcacaagttgctgggcctacaggagcgagttaccttgcccagctaattttgttaatttgtctatagagatgaagtctcactgtgttgcccaagctgatcctgggctcaagcactcccaccttggtcttccaaagtgtcagagaaagatgcaaagcttactatgctgcaggcttgaggaggaggaggccgtgagccaaggaatgcaggcagcttctagaagccaaataaggcaagaaaacagattctcccccagagcttctagaagggacccagccctgctgacaccttttcagacttctggcctccaaaactacaagaaaacttctatattaatagaagtgagccactgtgcctggcccacttatttggtttttaatttactcatgtaattttttttttaagacagagtctccttctgtcacctaagttgaagtacagtggcatgatcacggttcactgcagccttgacctcccaggctcaagcgatcctcccacctcagtctcccaagtaactgggaccacagatgcgtgccatcacacctggcaaattttcttatgttttgtagagatggggttttgccatgttgcccaggctagtctcgaactcctgggctcaggtaatcttcctgccttggcctcccaaactgctgggagtgagcctagtgagttacagtgagtttcaggcatgagccacagcacctggcccactcatgtagtttacaccaatgtcccttctgtcagtggcagccccagttcctgggtgaccagcgccagcatttcctgcctcaggccctccacggcgctgttccctccacggcactgttccctccaccgcgctgtttcctattcccagagccctcaccttccactctccccaaggttggcttattctccttccccagcctcgcctgtcacctcctcataaatgctttctctacccagccgtgcctcacaacccagttactctgcttcacatcaccctgtttgatttccttctcagaacctgccatcatctgatagtgcctattatctgtctccccacgagacagtaggctcccgaaggatcttgtctatcttcttcactgtgttattcccagggtctggagcaatgcctggcacagaacaagggctcagtaagtgttgagtgactattgaacaacagcccaggcaacagctgagggggctcatctggggcagggctgaggggcggagggctgggtgcagcagagagctgctcctctgttccggctctgcagctgagcccccaaattaggttgcttccttagcaaccctgcctctctccccagccccgacctcagccctagacccagcatctccttccctgctcccccaggaagggtggggtcaaaactgggctccaccgcagaccccgttttggtggggtaggtgcaggcctggacccgcctccagtctctctcctcctcagtcctctgcccggactgtttcctctgcctgcgatccctcctgctgcagagcaatcatcccaaaccccagctcctcaggaagccttcccaaaggaagtgcagcctgatcccctccaggccctgcagcagccctgactatagcaccccacccccaccctttcttcccacctggactgcgcgttcccaggaggccatcatgaacagctgtgcagggtgcgcactgcagatcccaagactgccattcatgccgccatcatgcaatgacatggcctggggccctctgagctgcctctgcttcccacaccttttatcccccactgccgggagtttgcaggtttgttgaccacgtggctgacaaaccattgacccaccagctctgacagaggactggccatcagctcgcagccacaggggccctgttacaccctgagctgggtacagcccagcaacccttgtccatctcctgcctttatttattgctttagtatgtttttcgttgtttgtttgctttttgagatggagtctcactctgtctcccaggctggagtgcagtggcgtgatctcggctcactgcaacctccgcctccctggttcaagtgattctcctgccttagcctctgcctcctgagtagctgggattacaggcatgtgccaccaccacacccggttaatttttgtatttttattagagatggggtttcaccatgttggccaggctgctcttgaactcctgagctcaggtgatctgcctgccttggccttccaaagtgctgagactacaggcacgagccaccatgcctgaccttatttagtattttgtatttaaatgtttaacaatctttttaactggtcactgacttgaagctcacatcttgccttcacccagctctaacctgtcctgttctcagggtttatttctttctttcttttttttttttttcttttttttgagatggagtctcactctgtcgcccaggctggagtgcaatggcatgatcttggctcactgcaacctctgcctcctgggttcaagtgattctcctgcctcagcctcctgagtagctggaattacaggcacctgccaccatgcccagctaaatttttttttttttggtatctttagtagagatgggttttcaccatgttggccaggctggtctcgaactcctgacctcaagtgatctgccggcctcagcctcccaaagtgctgggattacgggtgtgagcccccatgcccagccctcagggtctatttccatgtctgctgtctgtcccacccataccttctgtggcaaccaaaacccatgatgctgccagccctggtctcttacattttaagagagacaatgtgagtgagaggcacacgtcattctcaagcaggagcacagcccctgcctttttctaggcccgagttggccagccagcgcacttcctgccccatgcagcaggcccgtggtctcaggccccactctctgcagcaggaacccagaagtgcctcccaccacatcctcctccccagcgtgttcaagcctgggagcccctctctgcttcagcaggtgttcagggagccccgctgggccctcccccagcccctggtggactcagagccctctgcgacacgggctccaaactctctcctgcaccctggcctttaggcttctgagagaggggctgtgaatgtcggtgggacctggagctgaggcgtggggtcgctgggtattggtgggagggaactaggcaggagacagttacagaaaacgctgactgaaacctgctcacaccctacaaacagtatggaaaactgaatgcagaaccaattgcataacttctgacccagcaatcccactcctgagcacatatgccctccccaaaaatgagtacattctttgggatcaactctgagggattaaaaaaaaaaaagaacattcatccatcaaaaggaggtgcacatcagtgctattcatcacagcccaagaaaacagcccaaatgccaatcatcagtactgtcgacacaatgtaaccctggcaaccagaagaagtaccgcctggggcaacacgatggatgaaattcacaggccttatgtggagagagaggagcccgacgtagcggggcacacaccgtatgcctcgttgatactaaatgcaaaaccaggcgaggctaatccacggagatgaaagtcagctgggggttactcttggcagcagatgtgtctggaagggagtgcggggcttagagggggcctaggcgccgcagctcacgtgcccttgatctgcatgctgcttacacagtgcttcactctgcggatgttcactgcgctgcatgcttatgaggtgtgcatttttctcttttttttttttttttttttggagagacagagtttcattcttgttgcccaggctggagtgcaatgctgcggtcttggctcactgtaacctccgcctcccgggttcaagcgattctcctgcctctcctaagtagctgggattacaagcgcccaccaccacacccggctaatttttatatttttagtggagacggggtttcaccatgttggccaggctggtctggaactcctgacctcaggtgacccgcccgccttggcctcccaaagtgctgggatgacaggcgtgagcccccgcgcccagccgggtgtgcattcttctgtatggcacatgttgataaaattttacccaaaccaaacacaatcttgacctttaattcatcttcgtgcaacacaaaactccctgaaaacctcaccacccctcccggcttcagaccctctagttcctccaaaccctcagtgcctgggtgacgaggcaccaccacactctcccagcttacttttcatcactgtcagctttagccacacgtgattttctcagtttcctgaccttactcagccggcctccaggcttctgatcaagctgttctctgtgcctgccatccccttcccgttccttctcatgctaattcccagtcaccctgcaaatcctagtagacgctgatgaacacacctgcctcgatgcgcccccccgtacctcggacgtcccccaacagagctgttattcggtggggtcattgtcactcttgtcatcgtctagcttgtgtttccctcatgagcccgggagctccatgaaggcagtgaccatgtctccctcttattccccaaatattgcctggcactgagtaagtgctccatccatacttgctgaatgaatgaatgaatgaatgaatgaattggccccatccttaccacttaaatctaatggtgagcagacttttttttttttttttgagacggagtctcactgtcgcccaggctggagtgcagtggcgcgatctcggctcactgcaagctccgcctcccgcgttcatgccattctcctgcctcagcctcccaagcagctgggactacaggtgcgcgccaccacgcccagataatttttgtatttttagtagggacaaggcttcagcatattggccaggctgatctcaaactcctgacctcaaatgatctgcccgcctcagcctcccaaagtgctgggattacaggcgtgagccaccgcgcctggcagtgaccagacttttgactgcaccgatgaaaccaggatccagaaaggactctctaatgatgtaggaaacgtcgagctctgtctcccctgcagctctcacaacacagaacagtccagtgaccccaggtgggtggggttttccctccacacggggcaagcagtccttcggcaaccagctccagctgaaggtcctcacgttcaactcaattccgacatgctccacctggaggtagcatcagccctcacaggtcgaggtctcagtcccacaagactgctcctaacttccgaggcccatcaccagccgccggttatttcacctgtgctttcgaccaaacaaccatatcagggtttctgggaccctttccttgggcttaatttgctagagtggctcagagaactcagagaagcacttaccgacatttactggtttattataaaggatattacaggccaggtgccttggctcacgcctgtaatcccagcactttgagaggccgaggcgggcggatcacgaggtcaggagttcgagaccagcctggccaacattggtgaaaccccgtctctactaaaaatacaaaactcagatgggcgtggtggcaggcgcctgtaatctcagctactagggaggctgaggcaggagaatcgcttgaacccagtggttgcagtgagccgagagcatgccaccacactccagcctgggtggcagagcaagactctgcctcaaaaagaaaaaaaaaagatattacaaaggatacagatgaggagatgcataaggcaaagtgggggtgaggggcaaagtgggggtgaggggcaaagcttccatgccctctcgggggccaccctccagaaacttccacatgttctgctacccagaagctccccaaaccctgtccttttgagttttatggaggcctcattacataggcatgactcattgaatcactggccgctggtgatcaactaaaccttcagcccttctctcccagaagaggggtgtggggctgaaagtcccaaccctctgatcgtgcctggttctctccagtgaccagcccccattttgaagctatctgggggctgccggtcccccgtcaactcattaacaaagaaaaagacatttattactttggagattccagagattttaggcatgtatgccagataatgggaccaaatgtttattttgagaccaaatatatttttatttgttatattgtaaaatatatattcagtcttggaatgtcaaatatacatttcacagtatcacaggatccaagtctgcctggctgtcagggtcaaggcccaagtcccagggcctatgaggctgcttcgggagccaccactgcccacccatcctattcaagcaaagctcccgccctgcccagccaggaaccctggctcctcacctggctctgccccagtgcctgtttgaaccctgggctcacttgctcctgtgtgctgggtgtgaaggaaacccttgaccactgaccaggagcaaagcaatctggtgggctggggtgggatgaggaggtaaccatcctaggctgggcccgctcagtgggagagtatgcacaagaaaagccctatgaccacccagaaaaaaatgggggagaaatcactgctttggattgaaatcaatgacagagacataacagcaatacgtaatacataaaccttgaccagatctggctttaaaacaacacagcactagaagtcattttggggccaggtgcggtggctcatgcctgtaatcccagcactttgggaggccgaagtgggcaggtcatttgaggtcaggagttcaagaccatcctggccaacgtggcgaaaccctgtttctactaaaaatacaaaaaattagctgggcgtggtggcgggcgcctgtaatcccagctactcaggaggctgaggcaggagaatcacttgaacccaggaggcggaggttgcagtgagctgagattacaccactgcactccagcctgggtgacagagcaagactctgtctccaataaataaataataggtaaagaaataaataaaagtcattttggtgacacatgggaaattcaaatgagcctcggatctcatgaccctttccaccagagcttctcctaactgcagacacactcctacatcagcacgcggccaccatcgccatctgagggaatgcatattttacttacttgcttcttttttttttgagacagggtctcgttctgtcacccaggctgaagtgcagtggcacaatcgcggctcactgcagcctcgactcacccgcccccgggctcaggcaggtctctcacttcagcctcccaatagctgggacggactacaggcttaaaccaccatatccggctgatttttttatattttttgtagacagggtctcactgtgttacccaggctggtctcgaactcctgggctcatgtgatccacccgccttgacctcccaaagtgctaggattacaggtgagccactgcacctgccaacctttgtatattaaattctacaacttgcctttttcaactcacggtatgtttccagatggatccaggtaaacaaccattgcactggcttcattcaggggatctgcttttagtattgcattgcatgagtcatatcagtatttttcccattttcctaagaggaatattgccagtctttcatgattccaaacaatgctaccacaaacattttttgcttgcttttctttttctgagacagagtctcgctccgtcacccaggctggagtgcaatggcacgatctcggctcactgcagcctccacctcctgggttcaagcaattctcctgcctcagcctcccaagaacctgggattacaggcgcccgccaccacacccagctaattttttttttttttgtatctttagtggagacggggtttcgccaggttggccagcctaggtctcgaattcctgacctcaggtgatccaccggcctcggcctcccaaagtgctgggattacaggtgtgagccactgcgcccggcacacaaacatttttatatgtgtctgagaatttctctagagctgggatcggggagtggaagtgtcagaggccacgtgcatcctcagctttaccagatacggcaaaattgctctccaaggtggtgatcgcaattcacactcccacacgtccctgtttcaccgcaaccttaccagcaatgttggcagattttacattttgcttatctaataggtgggtatagatgatatttaaaaaatgtaaagtaatgtttattgagcattaatgtggccagaaattgtgctaagccctttttttttttttttttttttgagacggagtcttgctctgtcgcccaggctgtagtgcaatggcacgatcttggctcactgcaacctccacctcccaggttcaagcaattctcctgcctcagcctcccgagtagctgggactacgcgcgtgtaccaccacgcccagataatttttgtatttttagtagagacggggtttcaccatgttggccaggctggtctccaactcctgacctcaaatgatccgcccgcctcggcctcccaaagtgctgggattacaggcgtgagccaccgcgcccggcagaacctgtgctaagccctttacatgcattatctcaaatagtctttgcgacaatcctgtgaagtaggtagttccccacgctgactgcagagaagggaaactgaagctcaggcccgagcaccttgctcaggctatgcggcaaatccacggtgaagctgccactgaaccctggctgccagagccacagcctgcctcttaccagtacacgcttgttcctcatagtttcagggtttttgttctggagacaggccggagtgcagtggtgcaatcacggctccctacagcctcggcctccgggcccaagtggtcctcctgcctcagcctcccaagtagctgagactacaggcaggcaccaccatgcccagacagtttttggttttttttgagttgggggggtctcactatgttgcccagggtggtcttgaactcctggcctcaagaaatcctccagcttcagcctccctaagtgttgagattacaggcgtgagccacggtgccaggcccagttttttctttgttattttttgtttccaaatgttctatattgaacatgtgttacttccataaggaacaaaagagccttaatatgctttattttaaaattgtcttttttttttttttttgagacggagtctcgctctgtcgcccaggctggagtgcagtggcgccatctcggttcactgcaagctccgcctcccgggttcacgccattctcctgcctcagcctcctgagtagctgggactacaggcgcccgcctcctcgcctggctaattttttctattttttagtagagacagggtttcaccgtgttagccaggatggtctcaatctcctgacctcgtgatccgcccgcctcggcctcccaaagtgctgggattacaggcgtgagccaccgtgcccggccactaaaattgtctttaagtccaccctccccctgggcaatggagcagggagaggcccagtgaggcgtgaggctggggttccgtggaccccacagaccagcccgatgcccacagcctctctcacaccttctctctttctcctgcatgcccttctgaaagagaaaggagttcctctcctgacggtggggtggggtgggctgccatggccgtctctggggcccatctcagattgcctggaagcccctcagtctgaaggcctcttgcccaccggccctactcaccaggtctggttggtgctggggtcttggtgcagaagggagctgagcacgaaaggggcacctcccttgggcgtgagccagggccgggccacatccacattgaaagcggccagcagggccaggcctgtagggaaaagaggagcgtttaatgaaagaggccttttactcccgttattccagcaaatcctgtggtgtcatgaaccccgttttacagctgagaaaagtgagactgcccagggatctttatgtgtgtgtgagagagaaagactagacgcaggtgtatctgacccagagcctctgatcctcctactaaaccaagctgtaccagtacccgagcccccctcctccaagaagccgcccctagctctccccaaagaagcacttcccacctcctcacgcctcttactgtcatttctgcacctgacacacagcgtgtactcacgtcactgcgtcttgtactgaagttacagtagactgtgagccccaggaagagggcctgtgtatgttctatgtacccccttcaagcgacccacgagaaaacgtatccccaaaactgcctgcacaagaatgttttataccagctttattcggaagagccccaaactgcaaacaacccaaatgtccatcaacaggagactggaaaagcccactgtggtatattcctacagtagaatcctactcaggagtaaagaggagtcaacaacagatacagcagcgtgatgaatcccaaaaatcattatgctggccgcgcgccagtggctcatgcctgtaatcccagcactttgggaggccgaggcggctggatcacttgaggtcaggagttcgagaccagcctggccaacatgatgaaaccctgtctctacgaaaaacgcaaaaattagctgggcgcggtggcacgttcctgtaatcccagctactcagaaggctgaggcaggagaattgcttaaacctgggaggcagaggttgcagtgagccgagattgcaccgctgcactccagcctgagcaacagagcaagactccgtctcaaaacaacaacaacaaatatcattatgctgagtgacagaagccttaggtcttccttctttcttctcatttatgtgtgattttttttatttacagcagaataggctcatgaattctattttattcaatggttataatctgttatcactatattggttctcaaagtgtcccttatttggcctttccatgaagaaatcattggtactggactaattctttcaccataaacaactagaatactggacaaaacctataaaatgttttcagacatttgacaatgggcagagcaggacagtgatctctagaaaacatggacaaataacacgagccctgtcgttaccctcagctttctttctggaggaattttatgaccctgatgtagggaaagggaattcaaacagagcacagcagatttgttaagctaaggcaataaaaatcatattgtataactccatttatatgaggttctagaaccagcaaaactaacctatagtaaaaaaaaaaaaatgcttgagaggatgggactaactgggaagggactagaaggaactttctggaatgatgaaaatattctatatcttgataggtgtttgaattaccaaggtgtgcatgtgtcagaacacacgcaatgaatggtccacttagaatttgtgcatgtcactgtatgtaaatattaccttaaagaagaagcacaaacacattttgttgatatgtatgctgaaatgtttagagttgaattatacttaagtcagcaatttatttttattaatttcttttttttttttgagatggggtcttgctctgtcgcccaggctggagtgcagtggtgcaatcttggctcactacaacttctgtgtcccgggttcaagcgattctcctgtctcagcctcccacatagctgggattacaggcgcctgccaccatgcccggctaattttttgtatttttagtagagacagggtttcacaatgttgaccgagctggtttcgaactcctgacctcaagtgatccacctgccttggcctcccaaagtgctgggattacaggtgtgagccaccacatccagcgtgcaatttactttaaaatgcatcaaaatataagatggcttgctggatgggtagatagatatacgtgataaaagaaacactcaaaagtgttgacaattgtcaaatttaagtgtagtgatgtggttgtccaccatataatttttcaacttttctatatatttgaaatttttcatttaaaattttttggggaaaaatagatatcgatagattacctcccaaagaggttttgccaattcatactccaacgacagcatgggagaaggtttatctcccccagtgttgcctggactgactgtgaagacattttcatccttgttttaagagtatatcatcatcttgttccaaaattattattatttttttaagatggagtttcgctcttgttgcccaggctggagtgcagtggcacgatctcggctcaccgcaacctctgcctcccaggttcaagcgattctcctgcctcagcctcccgagtagctgggattacaggcatgtgccaccatgcccggctaatttttggtttttttgtttgtttgtttatttgttttttttttttttttggaaatggagtcacactctgtcacccaggctggagcgcagaggcgagatctcagctcactgcaagctttgcctcccaggttcacaccattctcctgcctcagcctcctgagtagctgtgactacaggcgcctgcccggctaattttttgtatttttagtagagagggggtttcaccgtgttaagccaggttggtctcgatctcctgacctcgtgatccgcccacctcggcctcccaaagtgctgggattacaggcgtgagccaccgcgcctggcctaattttgtatttttagtagagatggggtttctccatgttggtcaggctagtttcgaactcctgacctcagctgatccgcccacctcggcctcccaaagtgctgggattacaggcgtgagccactgcacccggccaatttttgtattttcagtagagacggagtttctccattttggttaagctggtctcgaactcccgacttcagatgatccgcccgcctcagcctcccaaatattttttactttttattttattgagacaagatctcactctgttgccctggctggagtgcagtggcatgatcatggttccctacagtctttacctccagggctcaatccatcctcccgcctcagcctctcaagtagctgggaccacagatgcgcaccagcaggcctggctaatttttaaaaaattttttgtagagatggtgtctcactatgttgcccaggctggtctccaactcctgggctcaagtaatcctgccatctcagcctccccaagtgctgggattataggcgtcagccaacaagctcagccccaaaactatttttaaattatgagtgaggtcaagtctctttttgtaagtttgtttactgcctactcatgtacattattcattttcatgaaacgatattactttcttatttatttgtaagagcttttctctatccaagagaaacaggcaatgtgttatagatgccgcttctcacgcagctgtttgtcttgcatatgctgttttcccccacaactacgttttttgatgttgtcatattgtttttcctttatgacttcagcttcgggtcatgctcctccactcaggctatttcttttcatccactcatgtttccttctatattttttttcttctttcatttcttttttctttctttcttttttttttgagataaagtctcgctgagccgcccaggctggagtgcagtggcgctatctcggctcactgcaaccaccatctcccgggttcaagggattctcccatctgagcctcttaagcctcccaaatagctgggattacaggcacccgccatcatgcccggctaatattgtattttagtagagacggggtttcaccacgttggccaggatggtcttgaactcctgacctcaggtgatccgcccgcctcagcctcccaaagtgctgggattacaggcgtgagccaaggcccggtctcttctttaatttcttatgttcgaaccttttgtccatctggattttatttttacatttggagtgaaatagggatacaactttacttttttcccacagttgaaatgtctcatcattatttgttgagtagctcctcttaacccatagtttggaaatgctacctttatcatcctcagaattcacatgcacatttgggcctctgtcaggactcagctctgccccactgacctcatcgtcttttgcttggacacgttagtctcctggcctctttcaagacttgtacttctggatacatcctctccacatcagatgctagaaagattttttaaaagcatggtctgggccgggtgcggtggctcatgcctataatcccaacattttgggaggctgaggcggtggatcacctgaggtcaggagtttgagaccagcctgaccaatgtggtgaaacactgtctctactaaaaatacaaaaattagccgggcatggtggcgggtgcctataatcccagctactcgggaggctgacaagggagaatcgcttgaacctgggaggcacaggttgcggtgaactgacatcgcgccattgcactccagcccgggtgagagagtgagactcggcctcaaaaaaaaaaaaaaaaaaaaaaaaaaagcatggtctgaccatgccactccattgcttaaatctctagtgtgtgtgtgtgtgtgtgtgtgtgtgtgtacttttttttttttgagatggagtttcgctcttgtcgcccgagctagagtacaatggtgcaatctcagctcactgacaccttcgcctcccaggatcaagcgattctcctgcctcagcctcccaagtagccgggattacaggtacacaccaccacccccagctaatttttgtatttttagtagagataggttttcaccgtgttggccaggctggtctcgaactcctgacctcaggtgattcagccgttcaacgtgctgggattacaggtgtgagccactgctcccatctctaatctacatttacatgggaaaaaagcaaggtgaagtccagtttacagacttacctgttcaattactgttcaattaacgacttttgccataaacactcttgaaaagctatacaacttcttggcaacactcctttttttggtttagtgactttttcgtctctaaatacactgagtaaacacgatataaggaatgacatttgacatcgcactctcacgggaagacacactcacccatttacttactatgtaacagtttctagtccaacaatatcatatggaacaaatctgcgttgcatgtcatgtttggataaatcccatatgcctgcttttgctgatgtatgtcgattgagatggctgaagattctatgattctgaagtcgatgagcgcacagcctatttccatgtgtttggaagtgcttttgggttcagtatttattttgccctcaaggtgtttctctgtaacttttgctatgactttattttttatttttatttttttgagatggagtctcactctgtcgcccaagctggagtgcggtggcgcgatcttggctcaccgcaacctctggctcttgggttcaagcaattctcctgcctcagtctccggagtagctgggattacaggcgcccgccaccatgcccagctaagttttgtattattagtagagacgaggtttcaccatgttggccaggctggtctcatactcgtcctgacctcaagagatccgcccgcctcagcctcccaaagtgctgggattacaggcgtgagccaccgcgcctagcccccactgtcaaatcttgtcttctccttttaatgaggccaataaaccttcatgacaatacattttatacggaaactgtatttttatattcaaagtattgtttttatttatctaaacttgttttattggtcaattaatacattttcctaacagtaaaagtcatttgagtatctttggttggctggaatgcatcacaatttttttaatgaaattgatgcaaatattttttccaattaatggctgtttactcagcagtagatttcaggaagaaattaaaatcactacatgaaggacaagtgtataaacgacactagcttctgtataaggaagggaaggagatatatgcacacaaatatgttgtttttgattcactaggaagatgtgacaattttaaatctgtatttatccaataacatcatttcaaaatataaaagcaaaaattgactgaattaaaaggaaaaatacaaaacactacaatgaaagtgggagactttaacactttaattaagccttttacgtcaactataaaagcagaccagcggggcgcggcggctcacgcctgtaatcccagcactttgggaggccgaggcgggcggatcacgaggtcaggagatcaagaccatcctggctaacacggtgaaaccccgtctctactaaaaatacaaaaaattagccgggcgtggtggcgggcgcctgtagtcccagctactcgggaggttgaggcaggagaatggcgtgaacccgggaggcggagcttgcagtgagccgagattgcgccactgcactcccgcctgggcaacagagcaagactccatctcaaaaaaataaaataaaataaaaaaataaaaataaaagcagaccaaaaattgagcaaggatatagaagatatgaacaacataattagcaaagttgacctgacagacaaaactctgtacccaacaatggaaaaagaaacatttttcttttttttttgagacggagtctggctctgtcaccaggctggagtgcagtggtgcaatcttggctgactgcaacctccgcttcccaggttcaagcgattcttctgcctcagcctcccgagtagctggaactacaggcacgcgccaccatgcccgcctaatttttgtatttttagtagagacggggtttcaccatgttggccaggatggtctcaatctcttgacctcgtgatccacccacctcagcctcctaaagtgctgggattacaggcgtgagccaccgcaccctcagaaacattattttcaagtacacgtgaaacatttaccaaaattgaccatatgctagatcacaaagctaaagcctcaataaatatcaatgaattgaaataactcagaatatgttctctgactatactagaatctaaaccaataacaaaaagaaaactagaggtccagcacagtggctcgtgcctgtcatcctagccctgtggaagactgaggcaggcagattgcttaagctcaggagttcaagaccagcctgggcaacatggctggtatctaacaaaaataccaaactccatctctaccaaaaatacaaaaaattagccaggaatggtggcatgcacctatggtcccagctactcaggaggctgaggtgggaggactgcttgagcccaggaggtggaggttgcagtgagccaagattgtatcactgcactccagcctgggtgacagaacaagaccccatgtaaaaaaaagaaaaaagaaagaaagggaagaaaagatggccggacatggtggctcatgcctgcaaccccagcactttgggaggccgaggcaggcggatcacttgaggtcaggagttcaaaaccaccctggccaacatggtgaagccccatctctactaaaaacacaaaaatcaggcaggcatgctgacagccacctgtaatcccaaccacttgggaggctgagacaggagaatcacttgaaccagggaggtggaggttgcagtgagccgagatcgtgccattgcactccagcctaggcacagagtgagacttgggaaagaagaaagaaaggaaggaaggaaggaaggaggaaggaaggaaggaaggaaggaaggaaggaaggaaggaaggaaggaaggaaggaaggaaaactagaaaaatctgaacctcgtgaaaattaagcaatgcatttctaaataacccagggtgaaagataaaattacagtggaatagcaaatcagacctaaaggaagtacgggaaggaataaagatatgaacacgtatcaatgaaacagcaaaccaacttacagtagagaaaactaatgatgctgaagttttttttaaagatttttaaaatgataaatcactagcaatactgaacaagaaaaaaaaaagagaacacacaaattaccaacatgaataaaaaatagaaaggggggacatcataatagatcctaagacatttaaaaaatagaggggccaggcgaggtggctgactcctgtaatcccagaactttgggaggccgaggcgggcggatcacgaggccaggagatcgagaccgtcctggctaacacggtgaaaccccgtctctactgaaaatacaaaaaattagccgggcgtggtggcgggcgcctgtagtcccagctactcgggaggctgaggcaggagaatggcgtgaacccgggaggcggagcttgcagtgagccgagatcgcgccactgcactccagcctgggtgacagagagagactccatctcaaaaaaaaaaaaaaaaaaaagtaagaggatgttatatccaaccttatgccagtaaacttgacaatctgggtgaaatgaacaaattccttgaaatagaaatgcaccaaaactaacaaaaaaagaaatgtatcacctgagtaagatattttactcatgactaaaaatcttagggagatctctacgcccagatagcttcactgacgaatttttccaaacatttaaagagaaataatgccaagtttatataaactgttttagagaatagaaaatgagaaaacatttttcagtcattttatgaagccagtataacattgatattaaaatccagcaagcacaataaatgaaaggaaaattgaaacaaccgtctctctcgaacataaatacaaaaatgctgcacaaaattccagtaaatcaaatccagggaattataaaaagcataatacggccgggtgcagtggctcatgcctgtaatcccagcactttgggaggccaaggccagcggatcacgaggtcaagagattgagactatcctggccaacatggtgaaactccatctctactaaaaatgcaaaaattagctgggcgtggtggcgcacacctgtagtcccagctactcgggaggctgaggcaggaggatcacttgaacccgggaggcggaggttgcagtcagccaagattgcgccactgcactccagcctggtgacagagcgagactccatctcaaaaaaaaaaaaaaaaaaaaagcatgatacatcaaaacaagcagagttcatttcggaaatggaagagtggtttgacatttaaaataatcagtttactccttacaacaggaaataaaggattaaaaatcatatgattatgatagatgcagaaaatggcatctgataaaatccaagactaatttctgataaaaagtcctagcaaaccaggaatcagagggaatttttttttccttttttttttgagatggagtctcactctgtcgcccaggctggagtgcagtggtgtgatctcggctcactacaacctccgcctccctggttcaagcgattctcctgcctcagcctcccaagtagctgggattacaggcatgtgccaccacacccgcctaagttttgtatttttattagagacagggtttccccatgttggccaggctggtcttgaactcctgacctcaggtgatccgcccacctcagcctcccaaagtgctgggattacaggcatgagccaccatgcccggctgtgaatttctttaatctgatgaagaattaaagcggtggggtctagctatgttgcccaggctgatttcatacaccggccttaagcaatcctcccgccctggcataccaaagccctgggtttccaggtgtgagccactgtgtctggcctgctatgagtgtcttgcagacgtcttcatgaccatatgaacacattcctgttgggcatatgtctaaccgtggaacttctggatcctgttaagcatatgttcagctttagtggatactgacaaatggttttctctttttttttttttttgagagggagttttgctccgtcgcccaggctggagtgccatggcacaatctcagctcactgcaatctccacctctcgagttcaagtgattctcctgcctcagcctcctgagtacctggaattacagatgcccgccaccacgcccgggtaatttttgtatttttagtagagatgggcttttcgccatgttggccaggctgctctcgaactcctgacctcaggtgatccacccgtcttggcctcccaaagtgctgggattacaggtgtgagccaccacacctggttttaatttgcctttctctgacgtctgaagtctccttacaagattcctgactattttgataatctcttttgtgaaatgtcctttttctgtttgtggacatgcctttttcttattgatttgtagaaattctttacatattctgaagttaatcttttatcaatttgtgttgcaattattttcttattctgtggtttgccttttcactcacttacttttttttttttttgataaacagatgttcttaagtttaatgaagttcaaaaaaaatttttttagcccccaaggttgtacacagtatgttttctttcttttttgctttttgagactggctgtcactcttttgcccagcctggagtgcagtggtgtgatcacagttcactgcagcctcaacttcctgggctcaagtggttttcctgcctcagcctttcgagtagctgggactataggcctgtgccaccagacctgactaatttttttttttttttttttttttggtagaggcgaggtttcactgtgttgttcaagctggtcttgaactcctaggttcaggtgatcctcccaccttgggctcccaaagtgctgagattacaggtgtgagccactgtgcccagcctgttctgtttcttgatacgggtgtgacttaatatgaacatttactgatctaaatttgtccatttttctgtatgttgtacttttaaaaagtctacattaaaaataataattattaaaataattatttaaaaataataattattaaaataattatttaaaaataataattattaaaataattatttaaaaataataattattaaaataattatttaaaaataataattattaaaataattatttaaaaataataattataattaaaatattttttagaataagaattacaagtatgtgaaacacactgaatatataaaactttcataagttcatgatatttacaagagagagaaaaataaaaacaaaagaaatcaaggtgactcacgcctgtaatcccagcactttgggaggctgaggtgggaggatcacttacactcgggagctcaagaccaacctgggcaatacagtgagactccgtttctacaaaaaaattaaaaaattagctgcacacagtggagcctgcctgtggtcctagctacttgggaggctgaggtgggagaatcacttgagcccaggaagttgaggctgcagtgagccttgatcacaccacagcactccagcctgagtgacaaagcaagactgtctccaaaaaaaagaaacgaaaaagaaaatttgctaccaatggaagtaaaaagggcaccatctctttactctgaaaactgactgttaggaaaagtattaagcatttttcttgcctttcctacatgaagtgcatttcagggccatcaaatcatcctggttaatgagaaaaagtacttcttgtcttttaagttttccttccttccttccttcctcccccctccctccctccctcccttccctctctctctttccttctttttttttgttttttgttttttgagatggagtctcgctctgtcacccaggctggagtgcagtggtgcaatctcggctcactgcaacctctgcctcccaggttcaagcgattctcctgcctcaacctcccctgtagctgggattgcaggcatgtgccaccacacccagatcaattttgtattttttgtagagatggagtttcactctgttggccaggctggtcttgaactcctgatctcaagtaatctgcccccacttggcctctcaaatgctgggatttcaggcgtgagccacctcacccagccttaaatttatttttcatttgttcatctggcccttataaaaatggcatgaaaaacgtcttttttatggataaattattactaataaatgtaggaagaataatagaaccaaactattttgtgagccctaatgaaatacaataattaattcaggccaggatcatcaacaggtaaagcttctaaatgagagtctgatagactaactttacaattaggctgacaccacctgagcccactagtcaatcttagcatccctaggagtgggcctctcaggcatgtccttcttggtgtgacactctaggaaggatctaagggcccaagactacatttccaacaagattctaagggacacccacactgcaggtcttcagaccacattctgagtaccaaggctttaaaacacttcagcaaagaaaagaaaaagaagggccaggcacagtggctcaggcctgtaatcccagcattttgggaggccgacatgggtggatcacctgaggtcaggagttcaagaccagcccagccaacacagtgaaaccctatctctactaaaaatacaaaaattagctgggcgtagtggcgcatgcctgtagtcctagctgcttgggaggctgaggcaggagactcgcttgaacctgggaggcggaggttgcagtgagccgagatcgcaccactgcactccagcctggtgatagagcaagactccgtctcaaacaaacacacacacacacacacacaaaagaaaaagaggtgaaataactgcaggaagtggggcaaaatcctcacaactgcttagagtgtgctcgccacagaactgaaacctgacgttaaacttccagttttcaggcagtttggggaataaaaagacaaatcacaccaagaggaagcaaacacacaaatcctgaacatagatattctgcaacacacgtgaccaaactctgccataaatcaaaggcatgaaagcagaaaatggggatgggggtgcactccagacggagagccacagcaaccgcatgtcatgtgcggaccttgtttggatcttgctttgaacaaaccaactgttaaaaagacatttggaggccgggcatggtggctcacgcctgtaatcccagcactttgggaggccaaggcaggcagatcacgaggtcaggagatcgagaccgtcctggctaacacggtgaaaccccttctctactaaaactacaaaaaaattagccaggcgtggtggtgggcgcctctagtcccagctacttgggaggctgaggcaggagaatggcgtgaacccaggaggcagagcttgcagtgagcagagatcgcgccactgcactccagcctgggcgacagagcgagactctgtctcaaaaaaaaaaaaaaaaaagacattttgagacagagagatttgtatatggactaagtatttggtattagatgataccaaagaattaatttagttaggtggtaagaacattgtggctatttaagaaaatgtccacgttctttattattgagactgagtcgtactctgttgcccaggctggagtgcagtggtgcgatctcagctcactacaacctctgtctcccggattcaagtgattctcctgcctcagcctcctgagtagctgggattacaggggtgtgccaacatgcctggctaatttttgtacttttagtagagatggggtttcgccatgttggccaggctgatttcaaactcctgacctcaggtgatccaccagcctcagcctcccaaagtgctgggattacaggtgtgagccaccacgcccggcccttcatgttctttagaaatgaaaatgtccatgttttttgggagtgaaatgacacgatgtttggggtttaaaatactgtttctgaaacattagcgtgcaaatgagtcatcggagatcttgttaaaatgcagattctgactcagcagataatgaatcagaatggggctgggagtctgttccaacaagctcccagacgatgctctcactgctggtcctcaggtcacattttgagcagccaggctttaaataccttgacaacaaaaatgaaaaggggaacacaaaatacattcagcttgtgtggcaggatcttgatcattgtgtcatccgcttgatggacatattggctttgttatagttatctcgtttacctgtgtacatgcttaaaattttattatccaaaaatcaaccttccagacttgaggaggaggaggaacctggggagatggctctgaggccaggctctggatctctcatccctgcatttaaggccatttccctgagtctggcacaaagtagatatctatatttaattttattttatttatgtatttattttttgagatggagtctggccctgttgcccaggctggagggcagtggcgcgatctcggctcactgcagcctctgcctcccgggttcaagcgattctcctgcctcggcctcctgagtagctgggattataggcacgcaccaccacacctggataatttttgtatttttagtagaggtggggtttcaccatattgcccaggctggtattgaactcctcaggtgatccgcccgccttggcctcccaaagtgctgggattacacgcgtgagccaccgcgcccggcctgatatctatattttattcctttttcttcacatctctgcctcgcctggaatgatttgtggtgattcataaaaatacataatacaggtaagataaaactcgcttaaaataatggggcaggcaaaaaagaacagaaggaaaatgatggtttaaaaaaagagggggatacaacaagccaggaaggaggccaacagctaacatgtagatcacgcagtgccagcactttctatcacgtgccccactgttggctctgaacacagcgctggctcacagaagtgttcctaaaatcctttggcttaataaaatcatttgttgattcaacgcatacatgaatgaatgaagctttcttgaaggtgatatcaacatgaaaaagatcagttaatgccatgcggtgtccacaaaattcaaaaaacaaaacacttccaggcaaagcacaaccagtctggttattcaaatcagagaaaaaactgtccctaagggtcctttgtgagaacacaatgaagaaaccctgcaccccagcttttgcagacctgtgatttgtgtcctccctgccaatgccccaaagtagaaaacacaggaaacataaccagaccagacgttcttgtttgggggtaatggatccctttgagaatctttttcttttttcttttttttttagacagagtctcactctgtcgcccaggctggaatgcagtggcacaactttcgtctcactgcaacctccgcctcccgggttcaagcgattctcctgcctcagcctcctgagtagctgggaaaacaggtgcccatcaccatgcccagctaattttttgtatttttagtagagatggggtttcgccatattggccaggctggtctccatctcctgacgtcctgatccacctgcctcagcctccaaagtgctgggattacaggtgtgagccatcatgcccggcctttttttcttcattttgagttggagtctcactctgtcacccaggctggactgcaatggtgtgatcttggctcaccgcaacccccacctcctcagttcaagtgattctcctgtctcacgtgggccctggggccggagcccagactccctactgggcatcccttatctcagctctggattcgtgggggagcagcaggaacagtacagccttcttccctgcctaggggtcttgatctggaacctttgagagtctatgtaggctgtaagtggccactctcccagcacctaccgagtgtaggccaggactcaaaatactgggtctctggagtagctgggactacaggcacatgccagcactcctggctaatttttgtatttttagtagagatgtggtttcaccgtgttagccgggatggtctcgaactcctggcctcgtgatccaccaccttggcctcccaaagtgctgggattacaggtgtgagccactgcacctggccccctttgagaatctgatggaagcattggagcccttcctgatcccctgagtgcacatgtgtacaaaatcctccccttgcctgattgaagtgctctgtcctcagcctgtctcctggcttcctcttcatccttttttttttttttttttttttgagatggagtcttgctattgtcgcccaggctggagtgcaatggcacgatctcggctcattgcaacctccgcctcctgggttcaagcgattctcctgcctaagcctcccaagtagctgggattacaggcacctgccaccacaccggactaatttttgtatttttagtagagacggggttttgccatgttggtcaggctggtcttgaactcctgaccttgtgatccgcccgcctcggcctcctaaagtgctggaattacaggcgtgagccaccgtgcctggcctctaatttttttttaaattttttgtagagatgggggtcttgctatgttgtccaggctggactcaaattcctgggctcaagtgatcctccagtcttggcctccctaagtgctgggattacaggagtgagccactgtgcttggccttccttgtttccctattgccagtgactgccccctgccaccagtgagtccaagggggcacacactgcatctgcctcgatcgccacattatctcagggcctggcatggtggcccaccctcggtaggtgctgggagagtggccacttacagcctacatagactctcaaaggttccagatcaagacccctaggcagggaagaaggccgtactgttcccgctgctcccccacgaatccagaactgagataaaggacgcccagtagggagtctgggctccggccccggggcccacgtcacgttgagccctgtgcctcctggtcagtcactctggggaaaaaacaggacgtcagcaaactgcctagaggagaattaaaaagtgcgagctgccaacatgttacgaggggtgggtggggggccttcttccccccgtttcactgtcggtataactgaaaaggcacgagtggaggccgcagagcaaagtccagtctcctctcctgggcgtccgtggcacccccccgctctgcccggcgcaccctctgcacactcctgcctccaggcctcgacacagcggctccctccacccagcaggcctgctcagcactctccacctctgtctgcaaagcccgtcttttgtggccctgctcagccagccaggagccaggagccaatccagactcagtcagagtaactcccgggtccctgagccccctcagcaccctgtggtctgtctggctctgaccaaaccctgagccccctcagcatcctgtggtctgtctggctgtgaccaaattctgtctggatcagggtgatctgtgattcagtttgtctgccctgaactgtgatgtgatctgagtcacacacaacacccccagccacagagcccagctcagcgcagggccaggcccacccaaaaaaggtgctctaaaaaggtcagagtgggccagatattccctttcctcacgccaccccacccctgtgttcactttgttcaacagagatcttgttcaactgagggttccgctcccccagagcacctgttgccttccaggcaccacgctaggtgctgaggctcagagaggggtgtggtttgtgcatggcccgtcggaagattgaatatttgtgtctggggctcagattctgtgtttatgcccgatttcaaagcctttagtaatagctggaggcaccgaggggttggtaaacagagagaggccagggtcacaaatggcctcaagaagctgggcactgctcctgccgtgcggcggctcactgagctggagcagggctctgcttacagggctggtaactaggtcagcaagagcctgccgcagaggcacggtggcatgagactgtgtacgtgcgtgtgtgcatgtgtgtgcatccgtgtgtgcttgtgtgcatccgtgtgcatccctgtgtgtgcatgtgtgcatctgtgtgtgtgcatccatgtgcatccgtgtgcgtgtgcatccgtgtgtgtgcatctgtgtatgcgcatccgtgtgtgtgcatccgtgtgtgtgcatccgtgtgtgcatccctgtgtgtgcgtgtgtgcatccgtgtgtgcatctgtgtgtgcatccgtgtgtgcatccatgtgcgcgtgtgtgcgtgtgcatccgtgtgtgcatctgtgtgtgtgcatccgtgtttgtgcatccctgtgtatgcatccgtgtgtgtgcatccctgtgtgcatccctgtgtgtgcatccatgtgtgtgcatccgtgtgtgtgtgtgtgtgcatccgtgtgtgtgtgtgtgtgtgtgtggtggggtagttcgctgtatttgctgggctttccctgagagccagctggtgcccaggtctgccaggcctggctcagcttgtttcctcagactggactcgccccaggcccaacagtttgcctttgagctgcgcctccatcaggaaaccacctcctgttgcatttcccaccaggactcagaaaacagcattgtcttggtagatggtcttgagttcaaatcctcactgccttggagtcactgaaggaccctgggcttggcacctcgcttccgtctcccctctgggacatggggctgtgcagatcaaatggggcgatacgcggccccaggtctgacgcaggaggctcagcacgtggaggctgaggttggagagagttataaccacaggcgagggctggccctccctcccaatcccccctcccgtgttgtctgacttacagacatagctacaccagtgtctgtcaccacactacccacaggaccacctctctgagctgtccccagccacggaggcctgctgagtcagaccgagatccccctccatcctgtcagccaccactgtctcccctcaaccctctgtctcccccagcacaccgggcaatttcaactcacattctcacagtacaataagtaccacgattcccaatttaggaaaccgaggcccatggggcatgatttgcccacactgataccaggagctgaagaagtggggctagatgcaggggtcccgacaccccgcccagaacacccagcggggcctcgtgggaggactgtgcctcagagccatctgcagccagccgcagtccccccacctcgatcttctacacggagcctcatcaactccaccccaaacctcacagtcagctgagcccatctctctccctcacccttcatctccctaataacaagaaaggccaacaggccttgagcactactgtgtgctggaaactaaatatatatatatatatattttttttttttttttttttttttttgagacggagtctcgctctgtcgcccaggctggagtgcagtggcgcaatctcggctcactgcaagctccgcctcccgggttcacgccattctcctgcctcagcctcccgagtagctgggactacaggcacccgccaccatgcccagctaattttttgtgtttttagtagagacggagtttcactgtgttagccaggatggtctcgatctcctgacctcatgatctgcccaccttggcctcctaaagtgctgggattacaggcttgagccactgcgcctggccttttttttttttttgagacggtgtctctctctgtcttccaggctggagtgcagtggtgtgatctcagctcactgcaacctctgcctcctgggttcaagcaattctcctgcctcagcctcccaagtagctggaattacaggtgcgcaccaccatgcctggctcatttttgtatttttagtagagacggggtttcaccgtgttggccaggatggtcttgaactcctgatcacaagtgctctgcccgccttggcctcccatagtgctgggatttcaggcgtgagccaccgtgcctggccaggaaactaaacgtttctcatgagtgtgtcctcctccccacgtctgccttccgcaacagccgcagatggggccaaggcagcagcctcctcacgggcctctctgcctcccctctcccccagattccaactaacacacaacatacaattctgtcgccatcctggtcaagaccttctgtggctccccactgccctcagcaggaactccaagctcccccaggccggcactcaggtccccacgttcctcaccacctccaccgtgggcctctcgggactggatgcccgcattcctccacttataccacacctgccacacgaatgcaggcctcccagagaagggcagggatgtggggctcccacacggcccacactcccccagccagctctcccccacacactgcattccgggggcatttcacctttgcttgggctgcccctctgcctggagtgccccttccctacccccgtgctgtgacaccctgccggggccggggaggctactgtgtgcacaacctgccttctcttcacacaggggctgggataggggtggcctcgcctctgcccgcacctccagggcccagcatgtcccgatttggggcggggctggaagggaaagcaacaccagaggagacaatctcctgctcccactcacacttcgcctccatcttcctacaaaccagactcttcacaccccagggcttggtccctcctatcccccctgcacagaaggcccctctgctcacccccagcctgtacttgccaaggacctccccgtccttcagagcccacctcagatgctacagtctcccactccccaaggactgaggttttctatcacgcacaggcccggggtgatgccccggcacagcccctggcctcagcccgagtgcgtgccaccagcagagcgggccctggacttctggttccttcttcttcacccctgtaaggtgttgtaggctgacaggacaggcttcttcacgcaagggtggaaactcaacctctgagacccaggatggagaagtgagttgatgtgactgcagaatgagtcaggggtgaagactgacttggggacagcaggccacagggtaagagggcatgatggggctggtggtcagggtgtggacagttccagggtttcagtgtctgtctgcacccaatgcttctaaaatctcccttagacaactgctattattccgtctgctgccacaaataagaagtaggcatcaccagagtggctggcctggagagagtggaaggtcagggccaggccaggccagtcctggattctctccagcctaaggaggcccaacccggcacagggtacagggtgctgggcctggagccacagtctgagggagttcttcctcccagcatctcctggacattttctttctcagactctcctcagcccccaagactcaacgccacctcacctcctccaggaaactctcctggactggcccatcctagtctcaggacctcacagcatggagcagaactgcagcagcctcgtttccgccacccacaccggagctgcgggggccctgctctggtccccttcccgtggctgagctgagctgtgggctaagtggtctcatggcaagtctgctccatcatcgctctctgctgcccatcagcttgggaagggcctaggcctcaaaagaggtttgatcgatgccacctgctggaaaaggcactgaggtgatgggtggtggtctcagaggctaaaggagacagatgagccacaggagtattctggagctgggaggcaggacagaggcctgggcttgagcctcgtgtctattatcagttgcttgcaagcctgggtagtcactgcccgctctgtgccccagtcacctcctctgtactgggagagggtagacaagagtctagtctaagcatctgctccagatattcttggtaatgggagatcaaagccacaagccataaaaagagtgagactctctccacaccccacatgtaactaaaaacagagaagtctaaattgtaaaataaaaggaagttcaacaaactgttgacctttccatggtgactattctgatgtttttgaaatataaaatattaggccgggcaaggtggctcatgcctgtagtcccaacactttgggaggccgaggcaggtcgatcacctgagggcaggagaccagcctgaccaatatggtgagaccctgtctctactaaaaatacaaaaattagccaggcgtggtggcaggcgcctgtaatcccagctactcgggaggctgaggcaggagaactgcttgaacctgggaggcagaagttatggtgagccaagatccagcctgggctccagcctgggcagcagagcaagactctgtctcaaaaaataaaataaaataaaatgaaatataaaatattaaaatctgtccaaaaacgtgttccttgctggtaccctacacattgtggcctgcttcctgggtgatctggccccaggtgggatgctaatcccaagtcccctcccagcacagcctcagcccatctttcagggagaactcagctaccaggagcctttcatccacataagcttgatgcccatccaattctccggccaacctcctgagcaggggcaggagacccatgggaagtctgctcagatcactaggcaggaccaccctggcctccggcttaatcttagcagcctccaggggctcacctgaccgtgctgtctcatcacagggggcccccgaaaggactcatggcttggcttgcccagaggcttccatgggacagttaaaggctaaaatgggaccccccaggcagcagaagtgcctccccccaccccacattccagtttttaccctgggcctgacaacacaggaagcaggctccctgccaacactcacaccctctaccatacagacacttgcccccagtctctggtcaacactctctcacagggtcctcaccctcatcagcccaacccctgctctgtaacagaagggagctctgccaggcggagcctccacactcagagaacaaactacagagtcaaggacctgccccaagtgggtgccatggggagagggcctcggtggcggggggaggctggctggaggaggaacagaatggcagagccctggagtccaaaggccctggctgacagaactggcaacacgaagcctcagccgcccttcccaacaagcctggggccctgacccaccgagcaagactcctttcctggaggagctgccactctctaacctctggctctaactgagccccatcagagacagacagtcaaggctgtagtctgcagacacctggctggagctgagggcacagcagcccctcgaagcagcgggtgagaggacttactggctatgcagagcagagtgtggaagagccacatccttgctggagcagaggcggctgtgtgggagccgaggcgagtgcgacacatgggccgtggcccactcagcttcccctcagccaggaggccaggaggcggggacagaagcacacacaccagcaaggacccacagaccggcactttcaaccaaacagagacactccggctcgtacacaaccagccgtgtggcttcctcagttgtgggctggaccctaggagcttaggggccactgtcagccccactctaccacccacactttgacccacactttcatggaatagggagctgaggtttggccagggccacagttctaggtgtcctcagcagatgctggaggtgcaggagcaacgtgaatccagcctgccgttcgtatcatccatttgagtcggtcccctgtcctgcctcagaacctaccaccagacatctcagcccagcttccagcccagggtcctcggtggtggttgcctcagcactgagacaggcgtccccctcccataggaagtgcctccccagccaaaaactgggctcttgtaccagcccatgcactcaaggccctggggttctggagggccaggtgagtggaaagacccaacgcactgagtgaaatcactgcctcgattcaacttcggctgcgttcattctctttaaaaccaggacagcaacctgacgtggaaactgactgaacaggactctgagttaccagaataacagaagtaaaattctatacatcttccagcatacctgtgatgcatcccagcattccacagaacacgccgttgacagctggcagtcgtgtttaagtgctgatctgagatctgtactgtgtgaccaagtctgtgacacagaaggaactctcctgcacccctgctccccaggctgctggaagtgcagagtggcgccgtcaaacagaactctgcgcggggatggaactgctctaggtcgacgctgtccaggatggtactcatgagccacatatggtactaaacccttaaaatgccactagaacaactgatgaactgaattttgtatattttatttaattttaattaaacgtaaaaaggcaggacattccaaggctctctaacacgagtgtctgcagccccattcgctttgagatgtgaatgtgttaacccagggtggacaatggtgttgacttcattactagataaaaatccatgttattttgtttctcgcattgaaaggctgcttggctaaggttctgtgaagatccgatgacatttccaacactttgccttgtctgctttgctctgacaaagtgcttatgactactagatcttgctcggttatgtgagattacaattcaccggtttccatcctgtatgaaacagaagttaaacagttgtaaaagcaaaattccaggtctggtggttttcctgccaggtcatgatgaaaccatcctacttctgttgaacctcgtcccaggcaggatcggggcctgcggcctacagcctgtcttcccagcgctccagggctcgtgaccctcctcctcccctcacttcattctgcgctccaagggcactggggagagtcacagtggtctcctctcccccgcattggcctaaagcaggaagagagcagcccagtcactgagcagatccctgctagggcagggctagaacccagactgcagctcactcgagattcctgagagaagactttgtgtttggagtgtgaacgtcagggtgcctcgggaagccagggaaagctgatgactgggtgctggacagggagcagggccacttctgtacctctgcacacttctagaatgcggactcatcctgcatccatccagtatgtatttatccaagcgtcagtgcctctagtcatgagacacacaggggtccgtaaagcccacctggcggtagctgctttccccacaaacccaaactacatccccaaggtcagggccaggctctgttgagtaatgctccccatcacagcacgcagcacaaggctggctgtttgacaaatacacacataaccaaaagacatgtgaatgtggtttcccaactcactttaaacaaatattccgggaccaacttcaaggacgttctacaacagaaactggactgtactcttcacaaacatcaatgtcatgaaagacagaaaggctgaggacctgctccaaacgaaaggaggctgcagagaggacaactaaaggcagcgcttgatcctggattggatcctggaccagaaaaacaacggctttcaaaatcattattgggacagttggcaaatttgaaacaggaactacaaattagcaactcctgggctgatcagagaatattacacatttcctgaatttgagaactgtaccatgggcatgtgagaggctgtccctgttcttgggaaatgttcactaaaacatcttacggataaacgagcatgatgtatacaaataatcctcaaatggttcatggttcagagaggataggaagaaacaggggtgagggagaagaggagggaacgaatgaaagagaaaatgtggcaaaatgttctttgttgtacccttcaaactgctgtgattttgaaattatttcaaaataaagttttaaatattttaaaaaatttttttctttctccccttgataccaggaagaataaagtttttaaaaaatgggcaggtgggccaggcgcggtggctcacgcctgtaatcccagcactttgggaggccgaggcgggcggatcacaaagtcaggagatcgagaccatcctggctaacacggtgaaacccggtctctactaaaaatacaaaaaaaattagccaggcgtggtggcgggtgcctgtagtcccagctactcaggagggtgaggcaggagaatggcgtgaacccaggaggcggagctcgcagtgggcggagatcatgccactgcactccacttgggtgacagagcgagactccgtctcagaaaaagtggccaggtgcacttgtagtcacagttacttaagaggttcaagctacttgggaaagcttgagcccaggagtttgagtccaatctagacaacatagtatgaacctgtctctttaaaaaaaagttgcaaaatgttcatggatggaggagacgtgctcggcgtgaggtgaaagggctgcctgtgggtcgggcgtggtagctgacacctgtaatcccagcactttgggaagccgaggtaggcggatcgcctgagttcaggagtttgagaccagcctgggcaacatggtgaaaccctgtctttactaaaaacacaaaaaattagccaggcgtggcagcgtgtgcctgtagccccagcttcgggaggctatggtgggagaattgcttgaacctgggaggcggagggtgcagtgagccgagactgcgccattgcactccagcctgggcgacaagagcaagacttcatctccaaaaaaaacagaaagggctgcctgctgtcttcagagtgagtcaaaagcactgaggcacagccttcagacacaggaaatggttctattctcccacttgccttctgactcttaggaagccagaaagagtgacggcattgctgagaccagagcccagggctgcagagcagtggtactcacgacctttgaacactcggtaggagtgccctgctcagtgccaaggcctcacatgcgagccctcatctgagcctctcagccacctacaaggtcaacccgatttctcagataaggatgctgcctctgagaggccacatagctagtaaggagcagagctgggactccaaacaggcctgtttcctccagaatcaggactctgaaccaccacaaactctcctgccttcagctcttttggtgtgtagactttttttatttttgtttttgagatggagtcttgctctttcatccagactggagtgcagtggcacaatctcagcttactgcaacctctgcctcctgggttcaagcgattctcctgcctcagcctcccgagtagctgggactacaggtgcccgccaccacacccggctaatttttgtatttttagtagagacggggtttcaccatgttggccaggctggtctcgaactcctgacatcaggtgatccccgcctcggcctcccaaagtgctgagactacaggtgtgagccacgtgcccagctaggtggtgtgtaaactttaaaaaagcagagatttcatcccacaaatgcagactgggatctccacatgaccaggtgctgtggactgaactgtaaatgtcctccaaattcatatgttgaagccctaacccccaatgtggctcttcttggacatatggcttttaggaagtaattaaggttagatgaggtcataatccagcaagattggtggccttacaagagccatgtgcaggcaccaagaaaagcctacgtgaataagacagcaagagggtgctcaccatgttggcatcctccggcctcagatctgtgggggactgcgggggtgatgggacagggagagaacaaggagtggattttcttgtcctttctaaggaaggggctgggagggcgagggctgcactgggtgctgggaccaagggtccaggggcttggatctcttgtttacaaacccctacttctttcctgctatctagcccacacccctgatgctccccggaaaggagagcaaggatccttgaacacgcgttagcactagaaggaaactggagctcaccccagttgagccctccatttgacagacagggaagctgaggcccagggaggtgaggggacttgctcagtctttccaattgagtatgtggggcagaaggagtccccagagccccggccccagccaccatcctatttgactttccccaacaggcattctacctcagctaaagatgctgcctgcctctcacaggccctgaggagaagatggccacatcacaggatcgaacactaccacaaaactcctaggaagggacaggaaggtgagaatcctttcttttttttttgagacggagtctcgctctgtcgcccaggctggagcgcagtggcgcgatctcacctcactgcaacctctgcctcccgggttcaagtaattctcctgtctcagcctcccaagtagctgggactacaggtacccaccaccacgcccagctaatttttgtatttctagtagagacggggttccaacatgttggccaggctgctcttgaactcctgacctcaggtgatccacccgcctcggcctcccaaagtgctgggattacaggcgtgagccaccaagcccggcctgagaattctcttctgtcaatggtgtgggcctctcgacctcactaacctatattggcccagaggtgatggtgacaatttgagataacacaaagtctcaactatttacgaacctggtcatccagagagggccccggaattgctcaaatgaacagtaagaatcctgaggcagggtactgaccttggtaggtgaaataccgcctatactctcaagttttatggatagtgcagccaaattccactcggatgcctcacaactacttaaaattggctttttgaagcagcatttccctaactactcccaggaacaaagttctgtgaaatgttcatagagcttcattgaaaaaaaaaaaaaaaaaaaagctacaatatttttcttctaagatttattttataaacatgtaagaaaagttgtagatatttattgtgggtctggttatgcaagaacaatcttcctggacacagtgtgcgattctcagtatcaaaagcattctcttctttcagttcgtaaaagaaaaacatggtttaacttctaatttactgcttattataaggtttaaaagcaattactgtacttatgtatcgaacttatttgtgtagcaactaattcatctgtgaagccatggtttgctgtggcttcacagtaaattttgacttaagtctaaagcgtgtgttagcatctcaccgtaacttaatgcttcgagtgagaagtttgaggaatgctgctttaggcaaaagagccactggaggaatgagctctgctcttttcacctgctctggactgctctcactttcctcaccgacaggaccacaggcttaagaactggctcagcagtccttctttagggtctagcgcctgcctaccagcttcctctacttctatcccgggacagatgaatgcttttctaaaaaatattttggaccatctgcatgattccctagcaaatgctttagagagctggtaagcttcagctccgacatggccagatcatcaaaatttgaagtttactcaggtctatttaatgagatttttttttcttatacaaccatatgcacttctgaataatcttccctttttcgaatctggggctttcatctggaattagactaacctgcagacagtgatgccagaactgggctgggttaccataattcattcatttaccaaacactttcgaagcactacttactctgggctggcctgatgaaaggatacagagataacaccacaaagaaacttgctcattaggagcttgcttactggctagaaaggaaaatacaacatgaaaataaagcattgtacgtacatggcagaaaaatgactagcctgccagagggccccagagcctcagaggatggagccactcctgaggctggagggtttacaaactcatcccatctttacagaagacctgctagatgccaggcatgctggcaggcacaggggaaagcccactcaacaagcagacacggtccctgctctcacggagcttacagtctagcaagacaaactaggaacaagaaattacagtccagtgtagaggtgtgcagggttgtggggtacagtgatttggcattatacacacatttcgcttaaacacaatggtatttgtctgaaaaagatttaaaaaaagaaaaacaaatcagttgtttgggccattccgctggcccctccttcactccatgagcatagacaagagggcgggcccgggcaagctcatgcctctgctgcacctgcggcctgcctcagttcccaagctccccaaaagtgatcttctcgcctaaatgtggttctaacaccccaaaacaagtgatttttgcacaacacagccctaactgcaggccaatcacttcacctggtactcaaccaaacagtaatgtgttcccacatgggcaagaaatgactacatgggacctcaagatgttggtcttcaatagggcaccttccttagatttctaagaggaattttaattacactccatttttatcttaggcactgaccttagaactgaatcctggagagagctgagactcttctgtggcagtaccatgggacacatagaagtagcctataccctggctctggaagttggggactgcctcctagaagggcccctaagaccttaagttggtgaggggaagattgaggcgggagggggagaagcctgggcggaagcatgtcactggaggtagaaacagctctgtgcacagtctgtagggctagtgagatcaagatacatttagggaactggtgagcagagggcaggggagatggggagaacaggccagggatactgccagaggatagaccttggtgagcctcataacatgctatcaaaaagggtggaatttatgtatgtatgtattttttgagacaggtcttgctctgctgcccaggctggagtgcagtggcttgatcatagctcaccacagccttgaattactgggctcatgcgatcaggagtgtggaatttattctcggggcaatagtgaagctttggaaaacgttcaagcagaggaataacagaatcagatatatatttaagaaagttcatcctgaagcatgtgaaaaggtgcccgacatcattagtcattagggaaatacaaatcaaaaccacaatgagagccaggcgtggtggctcatgcctgtaatctcggcactttgggaggtcaaggcaggaggatcacttgaggccaggagtgctagacggcctgggcaacataacgaaaccccatctgtacaaaatgtattttaaaaagaaaaaataaaaacaaaaaactacaatgagataccacttcacaccagaaaataatgagtgttggtggagatgtggagaaactggaaccctcgcacactgctggtggaatggaaaatgatacagctgcttggaaaaaccacctggtggttcctgaaaaggttaaagataattatgactcagcaattccactcctaggtatatacccaagagtcatgaaaatacctgtccctgcaaaaacttgttcgggaatgttcgtagcaacactattcataatagccaaaaagtagggccaggtgcagtggctcacacctgtaatcccagaactttgggaggaagaggtgggcagatcacctgaggtcaggagttcgagaccagcctgaccaacatggtgaaaccctgtctctactaaaaatacaaaaaattagccagcgtggtggcacatgcctgtaatcccagctactctggaggctgaggcaggagaatcgcttgaaccccggaggtggaggttgcagtgggccgagatcgtgccattgcactccagcctgcacaacaagagcgaaactgtgtctcaaaaataaataatagaaatagaaatatatatatatagccctaaagtagaaacaactcaaatgcccattaaccaatgtggattaaaaaaaaggtggcatacccataaaatggactattatttggcaattttaaaaaatgaaatactgatagaagctatgacatggatgaacctcagaaatatgttaagaagccagtcacaaatagacacatagtatatgatcccatttatatgaactatccagaacaggcaaatccacagagagagaaggaagatcagtggtggccagaggctaagagggaagagggaatagggagaattgctaatggactcagggtttctttgggtgatcaaagtgttttaaaattgattacggtgctggtgcataactgtaaatatactaaaagccactcaagtgtacactttaaatggctgaactgtatgcaaattacatctaaattaagctggtaacaacaacaaaggttcatcccgctgcagtgtgcagaatggagacagggcagagaccagtgaagaggctgctgtacaaatgcagctggaaagggcagtggctgaagaacggagaggggttcacaggatcagactacaagggggccagaggaggagactacatcctgaggacgccacaaattatcctgggtacctggtaactctccagagaggagagtgggaaacaaatgaggtatctgcaattatcatcaagcagcaaacatgtatgtaaaatctcctacacataagactaagaggaacacacaaagtgtgcagccctgtgcccacatgtgtggggagtgtccagggtaaaatcacgcccagctgcctgccacgggcctgtcctgactatccattcttactcttaaactccaaagaaaaggcctcatcattcaggacacactcaagatgttgcaagatctgagtgactgagagtgggcaggagggttagagaaactaataaggccagtaactccgagaagtaaaaatctttaaagctgcctttctgggttctctctgtgtgtctgtgaaaactgtaaggttactcgagtgtgtatttctcttggttacatcaaagacccagttttgactgcacaccacctccttccagaatggcttcgctgatctgtagcaggagactgctgagtgctgaaaggccgtggaacaaatggacctgagctgctggtgtaaaaccaaaaggaaagtctgtgaaggagcatattctaaaccctgcagaggcatgccagctgggacgctgaccacaagacatctttgccccgtcagtagaagcagagactgtgctgggatgggaataagcccctgtctacacctcatgcgcgccctcagttgtctccctggcgcctcctccacctgcagtagaaattcatgctggcgagcccactgccgtcacagcttgggaagagtaaaccgccactgagatgcaccaacaaagccaggaattctggtaacagcccactcaactgctagacgggaaaactgaggcccaggtccatggagcagagccaggggttggcatccaggtgtccgattctcaggcccccgcactcctcactctaccaactccccaaaccctgacccttcctaagaacctggctctcagctgtatgcttcacagggaaagaaaagctgagaaatctcagatgtcttaagtctcaactggcagagaaaccagaaccatctctttcctagaatcctaataagaagctgaaatatatcatggttatatcctctaatctctctaaagggagggagaaaaagcaaggttaatcaacaaaatatgggacaatacagtttttgttgcagctctcaaatcttgcagccctttacttcctttattaataacagtgttctgcattaattcgtgccacagtgtaatcaactatcaatgtgaccattagctccgccacaagtaaagatcgacaggatccaggctgcactgtgtgcacaacagcccaggcaggtgaagagtcgtgacatcgcaaaaaggaccacggtttattaccatctctaacgcccatgttccagcaaaccgaagaaaaacactgtttcttaaaactgcagaggaatacaaaattaaatactacaaaacaaaaatcagacaggaagacgaaacaatctacctcctcctaatggtaaaataatctgaaaggagtttaaaaataaatgaactaaaatttttataactattatcttttctgccaattttgaagatgtcttcaggtgccacaacgtggggacagaaagaataaatatcaatgtataacttctagagtgataataaacaacaggaccccatctcagatggatggattttttttcctactggagccaaaaaacaagctgaactctatgtacaacagacagactatacaactaggagcatttaaaaataataagactcctctctctgccttcttccaaagaatagaatatatatttaacagcacaaaagacgacaccacttgagcttcccctttagccaacaggaagaatttccacatataaaaattaaaaatttaaactttcaaatcattcatgttttaaacataatacagacttaaaaattcttcaacattgacccataatcccaccccagcacaaaaatcaaccccaaatccagacgtcacagttttttgttcctaaaaatcccacagcactgaacttgatcttcacatcaagctgacagcacgtaagaggcccatgccatgagcaatccccgagggaagaacggaagcacagtcaatgctgcagctcttatctacctgggcggcactggtgcacctctgaggtcaggtccgtgagattcgccccacactagggtcccggaagggtgagctggccgcttccctcctcttccccctcgaaggatgtccaataagcacctgggaattgacttttcttgggaaaagggtgctggtaacagctgtcagggccaaggcaatagtgagaagttcagttctctgctctttggatgaactgtgtaaaacatttcttttaaaagacacaatgttaaaaatattaagaaaaatgtctacaaaatctggagggctgcctttttctcaaagggtaaagcctgtggggtggtgggaaaggaatcgagggcccagaactacaactctgcagcgaaagatagagatgcccttgaaaatgtgtcacattcttaagatgtcttgccgaagtagcaagagcggagggtgactgtgtgagcaggagcgagagggcgccagctcctgcgggggaggttcctactgcgcgccccaccctgtgcaagaatgtcaggctttagggcagctgccataggccccaggggcatcaggactctgcctctgaaccagagctgctttcccgactaacttcaatctggagagatggtaagttatctaaccggctcttcttttggcgagactgctctttctccttaatcagagccccccatgccctttgcagctcagagtcgtcttcctcagcgccaggcgccctgtgatccactttcttcgtattcttttctttggtcttgggtgcagatcctaggcgagtccataaattacctgtttggatgagatggcatttcactttcgcagtcagcgctaagaaccagggtagcactgagggggcagcagcactgccaacacctgctgtgcaggaaacgccagcagtctgtggagcctgccaccacagtgcagccttgggcaggcaaaatctcatttcccgggccgcagcccctgcccgcaaacggaagggtctggacccagcacgggattctcaccgtggggggacaggtcaggtccctccctgtcaccagacacatcagaatcacctgagaggccgtttcctcctactcctgcccttccctgctgagacaccaccctgtgtgccaatccattctgccagaagtaggccactcccagatcccttccattaatttttgaaatatattttatgaaaatttaacaatagagaaatacgtgtttagaattttgtagacggccacattataaggcaattcaaagttgtttttgtttttgtttttgagacaaggtcttgctgttgcccaggctgaagtgcagtggtgcaggcgcccaccaccacgcccggctcatttttgtgtttttagtagagacagggtttcaccatgttggttaggctggtctcgaactcctgacctcaagtgatccccccgtctcggcctcccaaattgctgggattacaggtgttgagccgctatgcctggcctaaaagttttatttataaagattataaaatgtggcaaacaactacgataaaatgctgtatgaaaaaactaggatttgtatgtgggcaaagaccagaatagctcacatgaaactaaaaagatttgtgccaaacagaaagagccaggagtgtgctatttttttctattttctaagcgttcctaactgttgggatgatgctgatgctgatgctgacgataactataatggaaaaggaataatcacttatatttggcgtgggctgtttcttgccttctgctaagaaagtatttctccaatacacccactgtcctctgctctcactgaatccccattcccatccgttttaagtgttaccaacctgatttcttctcccgagtatcggcgtagaggcctttactatcctgcctgggaacacctagcctactatgcacatcagaagagggctctctccgaacgacggggttactactaaaagccttttccggagaatgtggtctttttcctaaccgctggcgtatatctgaaaaaagagaaaaagtgcaccagtgaccgtgtgtgtgctttatgctcggcaccagccgcctgacacctctaacggatctggcgctaacccctgccccgaggacacagggcctgacaatcaggctgctaagtattcttcctttgtaatcagtctggatttccttaggaaaattcggacataggggctgtcagaggaaaaatcctcaactgattactccagaactatatttctgaagaaacaacctttttttttttttctttaagcagaatcaagaagactaagtaatttacaaaagtttcagcgaacaaaaaatcctgtgagctcctggaaagtggaaggcacaatctttgaacatacaagtagttcccaataaacttattacatttaaccagtaaatataaagagactggaaaaggcaaaggatcaaatgtgtttttccctcaatccccccagaaatcggcctgtcctcttgagttccccctaaccaccacagcaacaacagaaacacattcgttggtgaggccctgtgccgaggtctcctctcactttagcttctctcagagagcagcaccctggtctctggtcactgagacctgagctcctttcctccaacacttcctagcactgagtcttccttcacaagactatcctgttctttatccattctgtctccaccgacctagttcaggctcttgttacttttttaactctctaccccaccccactccaccctcaagttgtctttctaaaatagatgtaagatcaggttacttctcatgtaaaaaaatcaggtttgccaacagagatcctaccctctccaaggcctggctctaatgctactttctctaagaagtctttcacaacttcccgagtagatctatgacggctctgcgtcccctccaaaggcttctcacattcctagcacctagaccagggtctggcacatagcaggtacggctaaagacctgctgaatcagtgtttgaacatagaaattatctagttcaaactcttaactgttcagacaaccaccgaacttaatttctattattcttgtatataaagtataccagtgtcatacagaggaaaatatggttggccctcctcatccatggattccacatctatagattcaaccaactgctgatcgaatacatgtggaaaaaaagtaagacataagagtacagcaaaaaataatacaaattttacacaacacaggataagaatttataccgtattaggtattgtaaataatctagagatgacttaaagtatatgagaggatgtgtgtaggttatatgcagataatatgtcactttatataagggacttaagcatcaatggattttggtatctgtagggggcggggagggggtcctggaagcaagcccccagacataccaaggaacaactgtaattatttggaataaaaacatttaaagctagtttttcagaagtctgattatttttcatttcctcaatttccaacacctagcccacaatttagacatgatgaaccaggacagctaaatcagttcacacatcgcatgttttactcaggaacctctctctgccccagtctgctttccggagctcagaatccagccaggaatccaagtgaggaacagtacctgatttagtactgctgactggtggccgtggacgggagtgctgacgtttctcatctaatagatgtcggacatctgcaaatttctcaggtggtaatttgttaccaattcggtttttgatattgcttgaagatacactatctgccctcatggagttcctttaaaaagggggtaggatggggcacagttaaccaacttcaactgtgagacaagacccaaacaacaatctcatactttggaggaaacaatttaagaaatcctgtcttacatggccaacattcacttacaaatccataaacttataattatttgcttatggaaaccatgatctgcctgctctaaagagactggttctggtgagcaggttttcgaaggtggtttccacatgtgtatgtgctattacacagcatacaactacaagtcccccttttctgggacaaacgttaagtagaggcctacaaagagattggggcttccacttacacatgctgtgatgtggctgtagtcaacacacagtatagtctacagtctctctctttaaagggcagacttctctttcaaagagatatgctatcatgctaggtgccagcaccgttccggcagcattctctaccagaaagctctctgaaaaccaaaaataagaatgtgaacaggctcatgcctgtaatcccagcactttgggaagctgaggcgggcggatcacgaggtcaggagatcgagaccatcctggctaacatggtgaaacccagtctctactaaaaatacaaaaaattagctgggcgtggtggcctgtactcccagctccccgggaggctgaggcaggaaaatgctgtgaacccagaaggcggagcttgcagtgagccgagatcgtgttatcgctccactgcactccaggctgggcgacagagcgagactccgtctcaaaaaaaaaaagaacgtggtgaacaaggccatacaaacaaatcagcttgaatggtcttttcccctccccacaaacatactacgttacacagagcatccctagactctaacccttagaactgtggattctgcctgcacagaatctgctcacccctagtagtaatcaaagacatgcacattaaaataactattttttttttgttcatgaaactagctagcattagaaagaatggtaatagctaaggctggtgagcttgtaggtaacaggtggtaatgtgagtgattaaaacccttctgggattaaaacccttctgagcccgggcatggtggctcatgcctgtaatcccagcactttgggaggctgaggcaggtggatcacgaggtcaggagattgagaccatcctggccaacatgctgaaacccgtctctactaaaattacaaaaaattagccaggagtagtggcaggcgcctgtagtcccagctactcgggaggctgaggcaggagaatggcgtgaacctgggaggcggagtttgcagtgagccgagatcgcgccactgcactccagcctgggtgacagagcgagactccgtctcaaaaaaaaaataaaaacacacaaaaaacccttctggaaaaaaataaagcaatacttaccatctttttaaacacatattgttttgtgtaataactggactttgaggaatttattgagttagtgcaattgtaagaaaatagaaacctaaagtccatcaaaaaggaattcgttaaataaatcatgatactttcaaacaacagactatatacagttgaaaaaaataatgtctacaatatattaagtgaaaaatgcacaatgcaaaactataaatagcataacctcatctttataaaaagtatacttttatacaaatatatctacagcttttccctgtgccatacacacacacacacacacacacacaaatagctgaaaggttattcgccaaattgctaacagtagttattgttgagaaagaatgggaatacagatgattttcactttctatgttgtcttttgtttttataacaagaatcactgcttgtatagaggaaatactggatgcgtttattaaactcctacaagggactgaaatcagaatagataaaagatattataaaattaggaggaattaagaagttatactagtatttaaaatcaaattaaaagctagctttgataaaacaaatttttacctaatatttttcaactgagattccacttcgtcagcatacatagtcattttcatgcttttctttggtgaaggcgtggaaatcattttcagttctagatcatagtccatttcatctgagtctgagctgctggcactggatcgtctagacgcgctccgctcccggggctgcttgagagccgggagctcctcgtggtactctaccaccactctgtcatctgcatccatgtcctggtcttcttcttcctcttcctcttcctcctcctcctcctcttcctcctcttcaatgggttcctcgggaacattcactagccctgaagaaatttaaccagaaaacattaggaaaagcactaaaattaacaagtatgattttctactctacatcggtgacctttttaaaaggtggggttcccatccctgacattttattggagcactatctataatagtgccaaatggacattactctgatactgcaacaggaggatggctaggtaaagtatgatgcagcagcctaaccaaataccataaagtcatttaaaatacaactgacctttattattcacagattttgtatttgcaaatttaccaaatttatttgtaactccaaaatgaatacgtgcaatgcttccatggtcatttgctggcacgcacagagtggcaaaaaaatctgagtcaccaggcacacacactcccagtggaggtcaaacaaagcaacactccaccttcctgtttcatctcatgctgtaaacaagcgtctgtttcagtccaccgagtggcacatttttcacacttctgtgcctgctgctagtgatttcactgcttaaaatggccctgagtgtcgtgccgaagtgctgcctagtgttcctagatgcaagggggctgtgatgtgccttgtggaaaaataccatatcaggtaaggcattcaggcatgagttatagggctactggctgtgaactcaatgttaacgaatcaacaatgtgtcttaaataaggtgtcttaaagagaaacatatgggcccagcgcggtggctcacgcctgtaatcccagcactttgggaggccgaggtgggcagatcacgaggtcaggaaatcgagaccatcctggctaacatgctaataccctgtctctactaaaaaatacaacaaaaattagccgggcatggtggtgtgcgcttgtagtcccagctactcgggaggctgaggtaggagaatggcgtgaacccgggaggcggaggttgcagtgagccgagatcgcgccactgcactccagcctgggcaacagagcaagactctgtctcaaaaaaaaaaaaaagagagaaacatatgtaaaacaaggttacatattgatcaactgacaaaaatgatgtggccagaggctatgtacgattcagtatttgctacttcagtgttcacagtgactttatagaacataagcaccatgaataatgaaaatggaaaaatacaataaacgaaagaagtagaatataaagtacatgttcccaagagttatactatttattatgaaaacaaatgggaaaaatgtaagatgaactcagtcatcatacagggtactagaaataggggcaatttgctttttaatttccttaatatggatataaaaagtatatgatgaaaatattttaaagtaactcaaattggaaaagtgtaactgtgtaacagtaaagtatgtgtattattattattattttgagacaaagtcttgctctgtcgcccaggttggaatacagtggcacaatcttggctcactgcagccttgaccttccaggctcaggcaatctcagcctcccaagtagctgggaccacaggtatgtgccatcatgcctggtctggctaattttttaattttttgtaacgacaaggtctcactatgttgcccaggctggtctcaaactcctggtttcaagtgatcctcctgccttggcctcccaaagtgctgggattataggtgtgagccactgttcccatcctatgtgtattattaacatgtagatctcaaatatacaattttgtatatacacattaaataaaacatctagacttcatccctttctgtccccattacaatgataaatgtgtgtatatgttattttgtatgctgacttgactagttctattaggcatgtagaagattccatagattaggctcaaaacaagaacaattctttataaaacataaataaaatggttcttttacaataagcaccaaaaaaaggagaaagaaacccaagtcatgatatcccactcttctgaggcattcacatgcacaaaccaacaagcacaaagcactcaacacagcagcctatttttaatacagaaaaagaacaatacaatcagttcatctgataaaataatttcaaaaattgtttttggctaggcgcggtagctcacacctgtaatcccagcactctgggaggccaaagtgggtggaacacaaggtcaggagttcgagaccagcctggccaacatggtgaaaccccatctctactaaaaatacaaaagttagctgggcatggtggcgcatgcctgtagtcccagctactcgggaggctaaggcaggagaattgcttgaatccaggaggcagagttgcagtgagccgagatcaagcaattgcactccagcctgagagacagagcgagactccgtcttaaaaaaaaaaaaaaaattgttttcatgcagctgttgatattaatagtagaaaaattaggatcctaaggaaagttttgttttaatttttcctatgtcatattttgccttttttgatagaacagcttttataaaatcatttgacctctttgggcaacttaaaattaattgtgacttgacttactttcctatatgttggcagagggtgagggcaaggaagagaggatgataaagtttggaaccttaaaagattgcattaagaataaaaatatgatttcaggagccaaacatgtgtctacccaagagctgagcaggcaactaccagaatgtcgatgtttatacgacgtcaagccaacgtcatccccaatcagggctctcttcttgatcacgtcccgctgaatacgacgggaatgatatcttcgcttcctgcaagaatgccaaaataagcacacaatcaaaaactgataggaaggaccttgaaatccactatttctttctcttttcttttttttttgtgatggagtctcaatctctctcccaggctgaagtgcaatggcaccatctcagctcactgcaacctttgcctcttgggttcaagcaattctcctgcctcagcctcccgagtaggtgggattacaggcgcccaccaccatgcatggctaatttttgtatttttagtagagacggggtttcaccatgttggccaggctggtctcgaactcctgacctcaggtgatctgctggcctcggcctcccaaagtgctgggattacaggcgtgagccaccatgtctgggctcgctaattcatttcaactacacgttgacacaatgttaggtactaacacagatattttaaatgtaactacaattcagcattccccatcatttaccacatctaagaatcttgaattcttccctcttgttttccttccagtttacacagggtttagacatttcaccacggaataccaactgaaggattaagaaaaactcaaatactattgcatttgaaggttttggactcaccatgaattgctaagaattcctttcatgcctccataatttggattcccatatttcatgtaatactgacttcttctggctgctccaagttcctttttgtcatctaaaaattaatgacaatagttacctaggatttcctgtgagtgtaaagacaatgttgaattttttttttaatgttttccatagctggaatcagatcagcgcaatttgccaacaaaaagtaaaaatccactaccaacattcacactctgagtgcccactacagcaatgcagtgtagaggggataaagcaaaatacagagacgaatgaggttaaaactgctgtttggagccagatgacttaatggagaaaacaaaaataaacaatacaagatacaaggttccaaaaggcataaaagagctttaggtcattacaggtacccaggaatcaaaaagactttctcaaaatagtggcatttttgccaccccatgaaagatgatattcacttctgaaggatcacatgccaacaacacagcatcaggattaaggaaacagactacatataattccatatatttggtaaatcatttttccagtttattgtgctcctcaaaatggcttaaagaaaacagcataatactatacatgtagaatgtactcagccactcaaatgagtaaatgtggtaaagatcacatttgtcaagttgaaatgtcagttaacaggaaagaaaggtggtcagtcatcataaatttttgtcaaaagtagtaatacaaagaccttccacagttcttggacactctgactgtaaagaacaaacaccactgtaaatatatccagggctgtaggtaaacgtgacaacacaaaccagtatgtatagcccccaacccccgaacccctcaaaccatgcccaccagctccttggagaaatggctgattccagatgtggagcaggtaagatgcaaaatgagtctggaaaagcaagatgttttgttgtgccataaagaaagaaagtgcttaaagaatcatggagtatgtcaaaacagcttgaaggggctctactggccaaatccaagacaatttgtaaattaaaatactgatattaggctgggcgcgatggctcacgcctgtaatcccagtactttgggaggctgaggcgggcggatcacaaggtcaagagatcgagaccatcctggccaacatggtgaaccccatctctactaaaaatacaaaaattagctgggcatggtggcatgcacctgtagtcccagctactagggaagctgagacaggagaattgcttgaacccaggaggcagaggttgcagggaggcagaggttgcagggaggcagcggttgcagtgagccaagatcgcgccactgcactccagcctggtgacagagcaacactccgtctcaaaacaaacaaaaaaataaataaaattaaatactgatatccatggatgataacccactgaataaagaatccatgattctaaactgatgtaaataaacaaacaggtaaaaacagaaggctcttccttagagcacctgtctactggtaaagaaatgacatagtcagaaaggcatgaagctctgatgagcaagaggctatttacgtgatctcaaagtatctgcccaccaattttttattttaatcatttttttattttttaaaatagggatgaggtcttgctatgttgcctagcctggtctcgaactcctgggctcaagtgatccttctgcctcagcatcccaaagtgttgcaattacaggcacgagccactgtaaccagccagcccaccaatttttaaattacaaatggaagaatagcaactttacagtggaaaaacctagtgatgattaccttaaccaagtgaataaagtgaacgtccctaggactgggacgagtaagtatccagggcctcctgacatgatgctctggaaatgacatgacatcgcttctgtggcacgcctgtctcaaatgcacaacccaaattcaatcaggaggaatcatcagacaaacccaaactgagggacattgtataaaatagtaaacctatattcttggaaaacatgggaggatagaagtagtttcagcttaagggggactaaggaaacattacatacttacacactcagtcctggatggatcctagacctggggctgggcggggaatatataaaggacattattggaacaactgacaaaatttgaaaatcgactacggattaggtaacagtactgtattaatgttaaatttcttgattttgttaagtgtgctatgtataaaacaatgttcttattctttggaatacatttaggggtgatgggtttttatcttcaactaactctcaaatgattaaaaaaaccaatatgtgtatatgtgtataatacatatacatacatacatacatacacacacacatacacacacacatacacatacacacacatatacatacacacacatacatatatacacatacacatacatacatatacatacatacacatgcatacatacacacatacacgcgatacatacatacatatacatatatacacatacatacacatacatatatacacatacacacacatttttaaatgcccaccaaaagtcaccatgtgtaaacaatcttatgagaagggaattagaaccgaatggtacactggcaatgttcaggaggacgttgctgtaataaataaagtttcatttgaaagttttcataattcagatggtaactggctgaaaatatatgaggcaaaccagtttcaacagaaaataactttagccagaagtcacagaaatatacaaatagttaatattcacttttaaagtcagaaattccaactcaggtggcaagcaattatttcataagcgcagaatattatagtttgaagggaactttgagattacttgatctaacttctattcaaaaaagaaggatgtcactccataataaatcattttgattgaaaatataaaacaataccaaatattacatttaccttttgtagcaaatctcatgaataacctatttcctttagcaagtttgttagctggacgaagatcgtttcttaacaaagactcctcttctacctgagacaacgtatccaacttaagaaagaagagtatttttaatataaaaattaaagtccttttgatatttcttcagtagtaaagctaccattaagaaaagcattctacctttaatacttacaagcattatagcactagttccgctgtagaatttctaactcagagatttcccctgcccaccttgtctaaaagaacagtctccatcattctctatcccctactcttttcacaacactcattgccacctgacacagtatgagatatctgtgcatcagtgtatcctctgcactccccactagaatgcaggctccgagagggccaggactttgttttgcttgaagctatatccctagcacttagaatatggtatataataggtactcagtaaatattttttaaatgaatgcatgttaatatttttaacaacagtacataatccattaggaagtatgccattacttgctgtttcttcattttactaattagataacacttcaaagtatttctcaataaaactattttctttttttgtagaagcataagcactattctaagatttcaaggtgaatcgctatatccacactaacttaaaggacaagagcctggtgcaccctcagaaggtctaatggtgaaagctagagaaaaaacgtaactaagtctttaaggcttaagttaaaaagacagtgagcaattttttacaataactttacatctatctttcccctattactaacctctacatcacttgagttctcatcttcaacctctccttcttcagcttcatcatcatctgaactgtcttcctgcttgtctaaaatggaatgtgaaggacaagatgaaacaagataaaatatttcatataatgagatacaagatgaactatctcatataattttaaaagtccagtattttctcctatttcctgatgatctcaagcatcatagattagttcagaaacacttggtgatgagatgctatatagagctctgctcagaaacaggactgtgtaaagaagaggactttcagaccccagttccctcctttgtgttgttaccttttttccttttctcagctgacttgtcctcactggcatccctgcttctgatcttatcctgtgcaggcagggagctcatattgataagtgctcgtgtggctgtcatttcatccagccaaactacattacctaaaataaaatgtaaaataagacattacacagcatggaaatggtaagcttcttgagagcagattctgcatcgcattcatcactacagcctcatctagcaacagattatcatcagtaaatatacaaaccaactaatgaagagaaatatagaccaggcatggtgactcacacctataaccccagtactttgggaggccaaggcaggagactcgcttggagtgagatcatcctgggcaacatagtgacaccctgtctctacaaaaaaatacaaaagtcatggtggcatgagccggtagtcccagctacttgggaggccgaggtgggagaatggattgagcctaggatattgaggctgcagtatgccaaggtcacaccactgcactccagcctgggtaacagggtgagactttgtctcaaaagaaatgaaaagttaaaaataaataaaaaagaaagaaagaaagagaaagagagacagaaagagaaggaaggaaggaaggaaggaaggaaggagagagagagatgaaagaaagaaaaagagagagagagaaagcactttgggaggccgagccaggcggatcacgaggtcaggagatcgagaccatcctggctaacacggtgaaaccccgtctctactaaaaatacaaaaaattagccgggcgtggtggcgggcgcctgtggtcccagctactcgggaggctgaggcagaatggcgtgaacccgggaggcagagcttgcagtgagccgagatgatgccacactgcactccagcctgggcgacagagcgagactctgtcaagaaaaaacaaaaggaatggaacagaatggaacggaacggaaaggaaaagggaagggggaagggtagggggaaaggggaagggggaagggaaaagatggaagggaaggggagggaaaagaaagaaaagggtagtaaaatctctctgatgaaattagcctagagctgcgtttccaaactgggttccacaaaataacttaagtattccatgaaaaagagttgtgtatatttaaactacttggaacagaacacaggtagttaaacactcaatatgtaagtattagcagttcttgataactgtcaagtaagtttggattgtcctttacactaccgccccctacagggaagccctttgctgctccttgtcaggacatgctaaacgaattcccccttcatcattcccattggaaaacgtggatgatgaaggtatccctgggatatgtagaatggaggcatgacagccagttggctttgtagcaactaatttaatgtgcctctttaaggaagataatttagcaagaaaagagctttgagaaatcttacggaaaataaacttaaaagagtatttctcaaaactatgcgtcccctatatctcagtttgggaaatgaagctctgaggctctcacttctgttactaatgtgccatgtggcctgaggcaaatatgttccttcctctgtttctcaggttctgataaataatacaaggtaggtgaactatgtaattctgagagtccctccaattctaatataccttagtcacagttttaatgacttaaatcagggttagtaaactataaccctcaagcaaaatctagcccaccacctgttgtttatttacatttgtaccagctttatttaggtttaattaatgtacaataaactacacacatctaccacctgcttttgtttttgttttttctttctttttgagatggagtctcactctgttgcccaggctggagtgtagtggcactatcttggctcactgctgcctctgcctcccagattcaagcaattctcctgcctcagcctcctgaatagctgggattacaggtgtgcatcgccacatgaggctaatttttgtatttttagtagagacggggttttgccacgttggccaggctggtcttgaactcctgatctcaagtgatcctcccgccctggcctcccaaagtgctgggattacaggcctgagccaccgtgcctggcctaccgcctgtttttgtaaataaagttctactggaaaacagccagactcatagcttctgtattatttatagttgctttcatgctaccacagcagagctgagcagatgtgacagagaccgttaagcctacaaagcctcaagtatctgcattccagccctttacagaaaaaggtctgccaattcccgatttggatagtgtaagttaaacagaaagaaaacaggagaaaaatgtttcactcagtcatgtttgtctttcaatgaaaacatcttcctacgagagcagctaagaaaaccggctgccatctagggtgctacccagcaggtcagccagctggcagcaagtaaagccagactagaagtaagtcaagacaagaagccagcaaagcagtaacaagaggtcaggccagacttacagtaagcaggcaagttaaaaattacagttggcccacaagttggaaagctcatgggtcagggcaagcaggtgacattctagaacacacagttcaaggcaagcagaaatgagaagtctagtagagtgtttagctctaggtcattctgtctattcagaatgacactctgtccagtgtctattctggtctatctctaggtcagagacacaggcagagtcagccctctgagtaacagtacagaaggcagtaatgacaaagtccaaggctctgaaaatgcagccccaagtctacgcagttggatcctctcctttgttgggaaaaggtgagtgttaaagaggcctcaatcaactacggcagattcagaggccagtaacccacctcctagagccctggccaccacctctcagctgacgtgggacactatggggtatgagctggcagactggcaagggcatgctgcgtttcactgctcgacaattttttctctcctggactaacagcagaagttcggcataaacaagtagtatgggccagaaccattcaccatctctgatggcaagaactcttgaaaaatcatcaacaaaagcatattcacaggaaactcgggtgtacttacaggaggtatcatccaaccattcgatgtgagctggaggatattctttaaaataggaaaagacatcttgggtgctcatctcatctactccgcaaatatagattgtctccagtctcaccttggggattgctagaaagacaagacacagaaaagatgatagaattttcctgtccgcaactgcacatcccatccacactccttcctaatagttcagacaacacgagtttagaaagaaacatgctgagagaaactataattatttcaaaagagcacgagacataacagtaaggtaaactatcttaatttttatcactcaacgacagcattaattcagaacaggcctatcaggctcagaaagattaaacaaagggtgttgataaaatacacgatacctctccccacattaatctgtagcaatcagagcactatcaagctcaacaggagtatttgttgaagttagccagctgcttctaaaatttttaaatgtatgttaaagagaaacgcgcagtagtggagacaattctgaaagagaagagatgctgcccgtgactatgtcaaagcatgaaactaaagagatgctacaagtcaattaagaagaaaaagacaacccaaaataaaaatgggcaaaggacatgagtaagcaatttacataaaaggaaatacaaaaggccaataaatatatgaggagatgggttgacctcactaccaatcattaacatgcacatgaaaacaagaagacaccagttttcacggaccagattttacaccttatttttcctgcgtctctggtccttgaatcgagatatcttacatcttttagtgtgaagtgctggcagtaagtaggggaaaggcttacttccccggctggtgggcatcgtcactgcggagggcaaatggaagggtctgcagaaaacgtgattttgcacgtgccctacggacctaggaactccagtcctcagtatcgcccctcaacaaacacatacatgtgggctcacgaagtagctcacacgaagatgtttgctaaggcacgatttctaataacccagtagttaccagggtaataaattatgctttatccacattataaaatattatgtggtaaaaaatgagataattatataccacagaaagattctaagatgtatcacagagtgaaaaaacaagttgtaaaaaattacatgcaaggtgatgacattaaacaataccatacatttactaagggtacatatttatgtacacagacacccagaaaaggccaatatgagtcacactgataactgctgttacttctgaggaggcagaaaggttgaaggctatggtcaaaaaagaaacttagccttatcaggactgcatactttttattttttgagatggagtctcgctctgtcgccaggctggagtgcagtggcacgatctcggctcactgcaacctccgccttctgggttcaagcgattctcctgcctcagcctccccagtagctgggactataggagcgtaccaccacacccggctaattttgtatttttaagagatggggtttcaccatgttggtcagcatggtctccatcccttgccctcgtgatccacccgccttggcctcctaaagtgctgggattacaggtgtgagccacggcgcccagccaattgcgtacttttttaactacctttttttttttttctttttttttgagatggagtttcactcttgttgcccaggctggaatgcaatggtgcaatctcggctcactgcaacctctgcctcccaggttcaagctattctcccgtctaagcctcccaagtagctgggattacaggcatgcgccaccacgccatgctaattttgtatttttagtagagacgacgtttctccatggtggtcaggctggtctcgaactcccgacctcaggtgatccgcctgcctcggcctcccaaagtgctgggattacaggcatgagccaccacacccggctttttttactacatattttaagtacattatctcctttaatctcaattgcaaaatttgtaaatatatcaataaataaacttaaggtcgggcgcggtcgctcaagcctgtaatcccagcactttgggaggcagaggcaggcagatcacgaggtcaagaggtcgagaccatctggccaacatggtgaaaccccatctctactaaaaatacaagaaaattagctgggtgtggtggcaggtgcctgtagtcccagctacttgggaggccgaggcaggagaatggcgtgaacccgggaggcggagcttgcagtgagccaaaatcgcgccactgcactccagcctagcgacggagcaagactctgtctcaaaaaaaaagggaaagaaaaagtaaatttaaaatatctatatatctactacctagctttatgcttaattcgttataagatctcaggcacacaaaacattacatatgaaactggggcccacagtacctctccacatcccttctttcccttccttctctgaagcaattctgtcaagggggtggttcatgggtccataagaaaatagaaagaacaagatctactgtttaacagcacagtagggtgactacagtcaataataatttaattgtaaattttaaaataacataaagagtgtaattggattgtttgtaactcaataaaagcttgagggggctgggcacagtggcttacacctgtaatcccagcactttgggaggccaaggcgggtggatcacttgatgtcaggagttcgagatcagcctggacaacatgatgaaaccctgtctctactaaaaatacaaaaattagccatgtgtggtggcatgtgcctgtaatcccagctacttgggaggctgaggcaggataatcactcgaacctgggaggcagaggttgcagtaagccgagattgtgccattgcactccagactgggcgacagggcaagactccgtcgcaaaaaaaaaaaaaaaaaaaagaggatggataccccattctccatgatgcgcttatttcatgtcacatgcctgtatcaaaacatctcatgtaccccataaatatacccacctactatgtacccacaaaaattaaaataaataaaataataatgtaaaaaagaatttaatgggcaggcgcggtggctcacgcctgtaatcccagcactttgggaggccggggcgggcagatcacaaggtcagatcgagaccatcctggccaacacggtgaaaccccgtctctactaaaaatacaaaacaattagccaggtgtggtggcaggcacctgtagtcccagctactcgggaggctgaggcaggagaatcacttgaacccgggaggcggaggttgcagtgagccgagatcgcacgactgcactccagcctgggtgacagagcgagaggccatctcaaaaaaaaataaaataaaataaaaaataaaaataaaaaaaggatttaatgtctattactaccaagcatgtttttacatgctattaacaaaatttaaaaattttttagcccatccttcttctgcagatatatgctattacttccatttaaaacaaaaaaaatttacaaacaaaaaaatgcatttaataattttaaacacataataattttaaatctcaaagagttaagagatgggtttaacatgagcccatgtaagtgtggccagactaattcagttgagtgctttcctgacatcccagatttaaaaagataaagacaccatgaagatttatgaatccaggtgggcatggtggctcatgcgtgtaatcccagcactttgggaggctgaggtgggaggactgcttgagtccaggagttcgagaggccagcctgggtaacacagggagaccccatctctacaaaaaattttaaaaattagctgagtgtggtggtgtacagctatagtcccaggtactcaggaggctgaggtggtatgatcgcctgagcccaggaggttgaggctgcaatgagccatgatcacacaactgcactccagcctgggcaacagagtaagactttgtttcaaaagaaaaaaccaccatgctcagctaatttttttattttttgcagagatggggttttaccatgttgcccaggctggtcttgaattcctgacctcaagtgatctgtcttggtctcccaaagtgttggattacaggtgtgcaccactgcacccagcgcctgcatctctctctttttttgttctttgtatctttacctgcttcttttgaacaggattatccattgcccaagttttgatgtgtacgactttccctaaattaaaatagacatgtgaggctgggtgcagtggctcatgcccataatcccagcaccttgggaggccgagatgagaggattgcttgagcccaagagtttgagaccagcctgggtgacacagtgagaccttctctattttttttaaaaaaaaagacatctgaggccagaaattttgttccttacactctttcctgtttgcttttaaggtatttcttcacctgtatgtaggtttttttaatgttgtaatgttagaacaatgttatgatgctcttgataattatttttgtcattttttggtctttgttttctatgctagtctcatttaaaattaaattttttgtcagatcaataagtctccctaatgttttctccctaatcctcagtctgttccctctactatcactcaggactctccttgctttctgctgcattctaggaaaccatctctttacttcccttaggctgtttctgttccaaagtcatggcttttaattccaagaaccgagaaggcccttggactcaataaaccttatccgcatttaggcctctgttcactattgcactgccggtcactaataaggatttcctggggttccctagaaaagagaaggtagcgaattttaggtgagcacaactgaccaaggcacacatgtaggagagagacggattacaatgagaatggcacaaatctgaacgactaatgccagtctacacagtaacatggaaatgctgaccatagactgtccagggaatggaaaaaagcagtgtgactgcaaaggagaaaaacaaaagttcactgccataagagattagaaggaaacacacagactgttgacaatgacggggtttggatggtagaccgtgggcaacttttcttcctgttctatgttacaaattttctttggtgagcatgaactgtttgtaaaagagctaatgaagaaaagattagagtccagagtgaacaggctcatcaaaaatgctgacagcaggctaggcgcggtggctcacgcctgtaatcccaacactttggaaggccgaggcgggcagatcacctgaggttgggagttcaagaccagcctgaccaacatggagaaacctcatctctactaaaaatacaaaattagccaggcgttgtggctcatgcctgtaatcccagtactttgggaagctaaggcgggaggatcacttgaatccagaagttcaagaccaccctgggcaacacagtgagaccccatctctaaaaaataaataaataaataaccaaatctttcccacaggaaatgacaacagttccataagaagcaagctccaagactgtggatgaaacaaaaaaaaaaaagaagaaagccacactaacctcatttcttttttgataggattaccagatcaagaaattcagagaatacatagacggtgctctatttcaagttcattaagccacgtaatccagttcctcatgacagtaaaaggaactgtgggccttatggtaatagaataagacttatgatactggaagacactgcccacccttcaccaaccactggatgaagaaacagaagccacgtgtacacaatggagagcaagaagctgaggagtagagctaggagctgaaaggtagagttacgatgaaaatgcactcagcagactgaaagcagaggtttgaaatcaacaagatgtaatttaataggactacatttaaaagtaatttttttaaaaaagtgcctcaagtacatgatgagaaagactgttctgatgggcacaattcctggggaaaagacctaagtgctttggctgcatataggatgagtgcaacactgaaatggctgagacagagacaacggtgaggaacagtcctgccgttctctctgtgaatccaaccataactggaacccatatctcacctcagaaagaacattcagaaacggcaaagcgtttagagaagggagaccagaaagttgcgacacatgaagcaaagttgagcgaatgggcagcaagcctgtgcttccagcacccgaagggctactgtatgaaaggacttcacagtcacacagtaactgacggacagaaattactagaaggcaatgctcaacacaagtaagtacccaaaaataaagttgcctgtctcataaatagttctcacactgtcacttaagaaacattcaggcagccgccaaaagaccagtaggaagtttgccaaaaggcctgcagggttgggcacaaggttaacctagatgacctctgaggtctcttccaaccatgagagtttgaatcttgggcataaagagactgaacctttttgacactgaatcgttcaaatgtagcgagtcactcttgatgcaggacagtccagtgtgccacagcccaaactgtctgaatgctggcagagcagttaggaacacacgtttcagtcagatcagtctttgaacctcagccttgctacttacatagctgtgggactatgagcaagtttcccaacccctcagcaccttcattttctccccagtgaaacggaaataatcaacaccttctcctcacagggctgttgaaaggatcagttaatgacacagcagagcgactggcacatagtaagcacttaacacacgttatcttttattattgttgttggtattaataacaaataacttgaacttgacgcctagtgtggatgcaggagtcaacatggttattccaatttcctcacttgcccaagaagctaggtcacttaaatgacggctgggaagatggagaataccagatgatgataataagccacattaactgggcacctgccatgtgccaagcgccactctatggactgtaacattttgttagagtctcccagcagccctataagaattcctgtcattggccgggcgcagtggctcacgcctgtaatcccagcactttgggaggctgaggcgggtggatcacaaggtcaggagttcaagaccagcctggctaacatggtgaaaccccgtctctactaaaaatataaaaattggctggccgtggtggcaggtgcctgtaatcccagctactcaggaagctgaggcaggagaatcatttgaacccaggaggcggaggttatagtgagccaagattgcgccactgcactccagcctaggcaacagagtgagactccgtctctcaaaaaaaaaaaaaaaaaaaagaattcctgtcatctgcctttccagataaggaaactgagatttttagaggctaaataacttgcccgaggccatagagctagaaagtaacagattaagatttgaatccaggtaactaggcttcagagctcatgctcataaccatgaaaccaatggtcctcaatcctgtctgcacattaaaagtacctgaaaagatggcctggcgcaatggctcacacctacaacgccagcgctttgggaggccgaggcgggtggatcacaaggtcaggagatcgagaccaccctggtcaacatggtgaaaactcgtctctattaaatacaaaaaattagttgggcatggtggtgtgcgtctgtagtcccagctactcgggaggctgaggcaggggaatcacttgaatctgggaggcagaggttgcagtcagctgagatcgtgccactgcactccagcctgggtgacagagcaagactccttctcaaaaaaaaaataaaaaataaaaataaataaataaaaattacctgagaagatataaaaagaataactatcagccgggcgcagtggctcacacctgtaatcccagcactttgggaggccgaggcgggtggatcacaaggtcaggagttcaagaccagcctggccaagatggtgaaaccccatctctactaaaactacaaaaattagctgggcacggtggcaggtgcctgtaatcctagctactcaggaggctgaagcaggagaatcgcttgaacccgggcggcagaggttgcagtgagccgagatcgcgccactgcactccagcctgggctacagaaagagaggaaaaaaaaaatgctgggcagtggccaaggtgggtggatcacgaggtcaggaggtcaggagcttgaaaccctgtctctactaaaaaatacaaaaaattagctgggtgtggtggcatgcacctgtagtcccagctactcgggaggctggggcaggagaatcgcttgaacccaggaagtggaggttgcagtgagccgagattgcgccactgcactccagcctgggtgacagagcaagcctctgtctcaaaaaaaaaaaaaaaaagaaaagaaaaccagtaactatccctgggacctatccaactccaactaatataaagtggtctgagatgggcagcagggttccccagggctcaggaacactatcctaggccatgctgcctcctggacaaagaatcgactgaaataagcaagcttccccagctgacatcccacggccgaccttactgccttttttaggaatatctttagaaccgtgagactggagttgtacgttaaaaaaaaaaatttttttaaattaaaagttaaccccaaaagtgatcctattaaggtaagtatcatatttccattttacagacaaggagactgaaactaacaaggctcaagaacttgtcctcagtcacaaaggaactgagactagattctacgaggcttttgcgccctaaagagctccaacagatgtgagaaaacacttcaagtgggtgagcagagatgctccacgggggaagtgacacctgaccagagataaagcatgggacaaggaagggcaaatgcacagaatgaaaggcatgagccgtatcagaggcaagccgcctcaaggaatgctctcgggaccagaggtcgacaggtgtgataaagctatgacgccctcgcggtagagttgtgagagagactcacaggtatgcttgcgcccggctgtgcaggcacatgaaggtcaagccacacctggccttcacaggacttctcctcaaacagaaaccccgcccatgagggaagcaagggcgtgtttctgacttgaactggtcatgcaggataaagagtgaagcagcttccagagttcagctctgcatccacactgctgggcccattaggactgactgaggagggacgcaatatcagtcgatagcaccacatcctacattacacagcaacagagcaaaggagttaagggcaaggctctagagtcaaagaaactgggtgtgaatcctgactccacctttactagctacatgaccctgggcaatttattaaacttctttgagcctgcttcctctttataaaatagggataaaaataaattcctcatacagttgttgtgagcaacaaaaaagaaagaaatatataatgtgcttaacgagtctagtaaaaaagcaagttcacaacaaatagcagctattctttcattcattcaatatatttacagagcttttgcttttatcaaccaaacaaggctagagaagctcatacaatacagcacaggcctttaacatgcattcagaaggctgcctactaaaccctttatgaacacccaaatttgcaaataacacagagggaagccttctgcattcatggatttatattatagtagaataataaataagaacatagactcactaaaaaagtagtaatttttccttttatttataaattgctttagaaaactgcggcagattactatatacaataattcggggtgagttctagggagcaaaataccccaaaaaaacacaaagatcaaatcaaatcacaagtccaactgtaagcgcaggcttaaaactcagggcaggattagtttagctttctctgacaacaggatgttactgagtggtttacatatatcagatattcagattatcaatagattcagaatttttttttttaagacagagtctcgctctgtcgcccaggctggagtgcagtggtgcaatctcggatcacggcaacctctgcctcccaggttcaagcgattctcacgcctcagcctcccgagtagctgagattacaggcgccagccatcactcccagctgatttttgtagttttagtagagatggggtttcaccatgttggccaggttggtctcaaactcctgacctcaagtgatccacctgccttggcctcccaaagtgctgggattacaggcatgagccaccacacctggccaatagattcagattatcaacaaaagtgttaatggcttttccccaccaatctcaaaattgctctaactccccgaaaagaaggtctcactgtgatacactttcactacgtttaaaggcaaagaaaagttaacacctctacgataaaaggagaaaatgagtaagggtccttagaagcacaggttcgaatctcagctctgccactaactggtaactttttctgggcctcctcagaaaagacaatctcttatttcccagctctaacatctgagccagctgacagcatctgaactttaaacaggtgacctcagaaatggagacttcacaggtcccttctcacaagagtgcttggataaggagtggacacgcaaggcaaggccagaagcatgaggtgatggcagggaaaaggcactctctggggaaatgtggacaaatttcccacaaaacaccctgtacctttcttcatcatgtctcggtccaaggctacatttctttgggcaagatttacttccgatcgaaaatggaagcgcttggctcgctgctctttcttttcaattgcttcctagaaagtacagaaaaagtgaaagtagtaaaatatggagaaggcgagttaaatcacacatgcatcatgatgcatcagtgacaaacctgaactaaaaaagaagaaataagcaacactacaccttgaatcagtctggcagagacctggatattcacactcaatgactggggggatatgttaatatcgctgtaatttgcaaccatctccgacataacacagcctatcactgtgcctgggacatagtaggaactcagtgagtatctgctgactgaatgaatagtcctttaaagtttataaagttatatgacacttcatttgttattatcaattatgccaacaaattacaactaaacaatttcaacatcccaattttccaggtgcagaaatggaggcacaaaaaagcaaaaaggtttgctggagatacttcagctattaagcaagcagatctgattccagtgctatttctaggagcccacctacaaccacttcacattgtctgagcaatggtaatcacacctatcacgctcttccacattataactgcctgagcagtccactccctaaagctagtctgtttaaaaataacaccgaagcaaagaaactctccctcctcttccagcctcgtgtccacggaatcaccagttttcatctctaagtgataagaaccattgacactttactgaaaaaataatcagctttgtaagtttcttctaagagctaaaataaacccaggtccaactgtgggtttctgatggctcttaggaacccttcactaattggttttgtttgtttttgtttttgagacggactctcactctgtcgccaggctgccacgatctcagctcacagcaacctccgcctcccgggttcaagagattctcctgccttagcctcctgagtagctgggactgcaggtgcacaccaccacgcccagctaatttttgtatttttagtagagacggggtttcaccatgttggccaggatggtctcgatctcttgacctcgtgatctgcctgcctcggcctcccaaagtgccaggattacagatgtgagccaccgcgcccagtccccttcactaattgtatattgactttgccacactaattgaaggtctgactacagagagcttgtggggattggtaaagttgcaacacttctgttctttcccaatagttaacgctcattttcttcactgaagtcttcctagtacaaacaacaatttaccttcctttagaaacaaagtactaactctgagactatcacccttttcccatatacctgtgtcatataatggcaaacagtgtaagattatgaatagtttactttttcaattacagtaagaaaagattttcactttattctcttttcttgtctaaaagatgaccaattctctctctttttttttttttttttttgcggggatggggggcctttaagtgattggaaacacaagagacacagataaaccataaaaaggttagctgggcatgatagcatccacctgtagtcccagctactcgggaggctgaggcagagggatcaattgaatccaggaggcagaggttgcagtgagccgtgatcgcacccctgaactccagcctgggtgacagagtgagactctgtctcaaaaaaaaaaaaaaaacactataaaaaggaaggcacgaaatatatttttatttttgcttttatgtattcaatacagcaatatatactattattcagaaatgtaatacaaaattctgttccaaacttaactgtaaacattaaaatcagaaaaaatgtctaaaacggaacatcactgattaaagcaacttacatgtattgactacatataaggaaaataataggcttgactctatgaggtgttacaatgaaggtggtaatctggtaatagcaatcatcagatacaaggcaatagtcttattaagggcctattatgccgacacggtggcttacacctggaatcccagcacttcgggaggctgaggcaggtggatcacctgaagtcaggaattcaagaccagcctgaccaatacaatgaaaccctgtctctactaaaattacaaaaattagccaggcgtggtggcgggcgcctgtagtcctacctactcaggaggctgaggcagaagaatcgctggaacccaggaggtggaggctgcagtgagccgagatcgcaccactgcactccagcctgggcaacggagcgagactccacctaaatatggggggcctaccatctgccaggcacttttcatgttttgtttcatttcaagtggaaacagtacacatttttttagaaatggacataccatttaaaaaagcatcccccgtcttggacattttcttggaaacggttcaacacaggtatctaagtagagtgattttatcctttcatggctgtaagaacacacaaatgctgcctgtaccgtttcaggatgcatgaagacatcgttgtataacacaaaatttttttttgttgcccccactggagtgcagtggcacgatttcagctcagtgcagcctcaacctctcaggctccagcgatcctcccacctcagcctcttgagtagttgggactacagacctgtgctaccacacccgactaatttttgtatctttcgtagagacgggtctcactatgttgcccaggctggtctcgaactcctgggcttaaacgatccacttgcttggcctctcaaaatgctaggattacaggcatgagccagcgtgcctggccaataacacaattttttttagaaaaaaaatttaaatccagcaacaaaataaaagaggaaatatttactgttatgtcctagggatcaaattcattaagttcacttgcttatcaagctgaataaataaatcatagcctgtcttaccttggaggtgacatcaattccagtgatgaagctgccagccttgttttcatatcttctgctcgtgtcctaacacaaaggggaagggtgagaaattcagacagcaattgaggaaaaacctataataaaagtcggcctgacatctgcaggttcttttttccttttttttttttttttgttggtgacagtgtcttgctctgttgcccaggccggagtgcagtagaatgatcacagctcaccgcagcctcgactccccaggctcacgccatcctccccctcagctgggccctcaggcatatgccaccatgcccagctaattttttttttattttgtagagacagggtctccctatgttgcccaggctggtcaccaactcctgggctaaagcagtcctcctgcctcagtctcccaaagtgttaggatcacatgtgtgagtcatcacaaccagtctggttctttctgtttttctgtttgttttttgagatggagtctcactcttatcgcctaggcgggagtgcagtggcacaaactcggctcactgcaacctctacctcctgggttcaagcgattctcctgtctcagcctcctgagtagctgggattacaggcatgtgccaccaccgccagctaatttttttatttttagtagagacgaggtttcaccatgttggcatactggtctcaaactcctgacctcggtgatccgtctgtctcagcctcccaaagtgctgggatacaggcatgagccaccacacctggcaagtctggttctttttgaatagccactcttttcaaaacccttccccacccctgacaaccttttattaagaagccccatcctagtgattccatggtatcaatcaaccactccaataagaagatcagagcctgtccaaaaactgaagtgattccatcaactccaagtatccatgtaaagaaaatctaaaggcttttgtggaaaatgtcaaaagataaggcacagtcacttagctccccaacccagtctgaacgaattcctcatgcccagccaccaggtggagcacaaccctccacctcaacgcagaaggtccagcctcacctagaactcctgaggcaaatacagcacagtgcaatgcaaaggggatgggatttggaaaccaagcgaggactgaagcctcagctctgacagtcactaattacaggacactgtatagttttcttgacctctctgggtctcagtttcctctgtggtatctacctgccttcctgacctcttttactgcccttccattagtactacagaagtttccaacaatcctggacccatcccagagcctctgtgcttgttactggccctgctgggggaactccttttcaatcttcacaagattggctttttgtcatttagagtttatatggaacataaactccaggagggaggttgagcttgatcaagcacctagggctgtgccttggtacatagcgggggatgcaataaatacatgttggccggacgcaatggctcaggcctgtaatcccagcactttgggaggcagaggcgggcggatcacctgaggtcaggtgttcgagaccagcctggccaacatggagaaaccccgtctctactaaaaatacaaaattagccgggcacggtggcacatccctgtaatctcaactacttgggaggctgaggcagaagagtagcttgaacccaggaggcggaggttgcggtgagccaagatcaggccattgtacttggctactcaggaggctgaggcaggagaatggcttgaacccgggaggcggaagttgcggtgagccgagatcgcgccattgcgttccagcctgggcaacaagagcgaactccgtctcaaaacaaaacaaaacaaaaaccatgttgaactgaatgactaaagggatgataacacctgcttcacaactgcagtaatatttatttattttggttttgtttttgagatggggagaggggaaaggggggacctcaaaggggtcttgctatattgctgaggctggtctggaacttagactcctgaatagctggcactaaaggcgtgcacggccagtatatttaagtgacacaatatagtgaatggtaaatgctactatattagctgttgttaatcataattataacgtttgccatctctagcgatcatactttaacctttctccataacttcagtctaaatatgttgacatgtggtcaaaagtaattcatgttaggtgagaaattaagaggagtcatccaggcctgaaaccagctctgagaactggatatacagccaccaagtcacaagcaaaacacctctcaccatccccagcgcggtaaaggagggaccaaggatgtctattggtcgtctgctagtttgctttcattaagagtcagatgctggggccacggtgtaggtgtcactggagctgcggggggggcaagatgaccccgaagtcacgacagaaacagtgagtttctgctgctgacaagtgcagccctctcaagacaaagagcgagtgccatgtttcccagatacaaattcctccggggcaagacccacaaggagacctggttgctggcgccacccaacagctccttctgggctgcccctggttctgttcccgcccagggctccccctttatctcatccttccagcccctcctcactcacctccttgcacagcgcggctcagagggggcagcggaggggggtcctcaactccctcccagctctccgccaccaccccccagccccctcaacacccatttccggcgccccggcgtcctttctcccgctccgcgtccctcctccagcccggcgttcccgttcccaggacgctggctccctcctctcccgctcccttgacttccccggctggggctccggccaccgccccttccggccccctccggcgctagacactagccccgcgacctcttccttaccccccgacccccgcccgtaccgggatcagttccttgagcgagcgccgcacaggcacgatttccagctcgccctcctccacctccatgggctccggctcgccacggtcaacaccggactccgcctcaggggacgggagccccagggccggccccgccggggcctccgccttcaccgacacccgcaggccccgtacggccgccatcgctgcctgccggccgcaccactgagagcccgcccctcacggccgccggctagagcgccgctgccactggccacagaggagccgccgcagctacctagagcgtcgccggcttcggcccagaaggccgcccttagcgccgccgccccctggtggcgggagaaaaccgggccggctgcgcgggcgggacctggggaggagaaggcgggactgagcggggacgggggcggggcctgcgggaactacggagcttggaggagaccggggtagtcaagggttacaatgtagctacgccttgaggctaaagctgtactaaaagccaactttcctgagtgatcactatgggccagacacttccaagcgctcgaacccttagaacaactctatgaagtagatcctattttgacccccatttcatatatgaggaaactgaggcatagaaattgacccaaggtgacgccatttaagggataaaagctggatctaagtcttccagagtttacaatgagccttgatatatcacctctggacaatctgtaggtttataaagttacttgccttgccagtctttgtctcttaaaagtctccccaaaattggcccatgttacatacacaaaaattgagactccaagagggagagacctgcccaaaggccagaacttggacgccgatttcctgactcctgagggtgccatccactgtagacctgtgagcatagtttccggcggatatttctaacgagagcctggtgggggagaggggttgtctacgcgtcccgagggtgtcactgatcagctgctgttctgagtcctgattttctttttctttctttctttctttctttattcctttcttccttcctttctttcttcttttctttctttctcttttccttccttcctccctctcctctttctttctttctttcttttttttttttttttttgtagagacagggtttcaccatgttgactaagctggtctcgaattcctaacctcaagcgatccacccgcctcggcctcccaaagtcttgggattacaggcatgagccaccgcgcccggcctgagtcctgattttgcatcttcctccctgggtaaccttggacaggtttttgggtctgttttcccatctgaggagggcataggtgagaccctacagtctctgaggccctgaggccctaccagctctgaccatggaggagcaaataatgataaaccaaggaagagcatggtcagcatcagacacacctgggtttcgagctggctggccgggccccatccaccatgtgtgaccttaggcaagctgcttagcactttggagtctcagttccttcatcagtaaaatggaccattacctacctacaaaggaggttgtgagggttaaatgtgataatttatatgtagatacagggtccaacagaaggggtgcagtacatcacagtttttcttaaatttgggctaaaccacaggataaacacaagacagagctctttagaggactagttttatttgatgaatgggacacaaagtacttttaaaaattgggttgaggccgggcacggtggctcatgcctgtaatcccaacactttgggaggccaaggcgggcagatcatgaggtcaggagatcgagatcatcctggctaacatggtgaaaccgtgtctctactaaaaaaaaaaaattagccgggcatggtggcatgcactacttgggaggctgaggcaggagaatcacttgaacccgggaggtggaggttgcagtgagccgagatcataccactgcactccagcctgggcgacagagcgagactccgtctccaaaaaaaaaaaaaaaaaatgggttgaatgcatacatagaatatgtacgggtgtgtgtgtgtgtgtgtgtttaatttcaaacaaaatgtgtagttggggtggccagctataggtaagagtcacagcccccaccattactaggcctgtggggttaggggatgggagaggaggaagtaatccctcctcagctatggacaccaggaggccagtagagaaggctgggcaggcccctcaccctgctggggaggatgccttgttgcttgaggacgcaattcggtgaggattcagtgttgcagttcagtgccatccagaagagccccagcaccctggcacaccagccggcaggtacatgaggagtccaggacaagccgggacatcaggcaaacaccaaggctcctaggcgcgtgtcaggaaagccctctgtgccttgctctttgtggtcaccttagtcaccatctcccatcccctttcctgttcgcgatgcagcctgctgagttggagacacagagaatttaggaaggtggtaagggctgattttcaaaaagttgaaaaacatgactctcaaacagatgtaaaatgaacacatgtcaaagctgttacccagtcattagaaaatgaggaaaccagtagaaatatgaagaatagtttgaaggggaacttgaatgaatatgtggttggtcagtcaaaggaatgctgagatgaatttgacaaggcaagttaatgtcctgtaaggcaagaaacgataacctccaggactccctttaccaccagacagaaaacatttgcattactactggacaagaattatttacttgttataaattttcttttttttctttttttgagatggagtctcgctctgtcacccaggctggggtgcagtggtgtgatctcggctcactgcaagctctgcctcccgggttcacgccattctcctgcctcagcctcccgagtagctgggactacaggtgcccaccaccacgcccggctacttttttgtatttttagtagagacggggtttcaccgtgttagccaggatggtctcgatctcctgacctcgtgatctgcccgcctcggcctcccaaagtgctgggattacaggcgtgagccaccacgcccggccaaattttcttttttcttttttttttttctttttttgagatggagtctcgctctgtcacccaggctggagtgcagtggcacgatctcggctcactgcaacctccgcctcctgggttcacgccattctcctgcctcagcctcctgagtaactgggactacaggcgcctgccaccatgcccagctaattttttgtattttttttagtagagacggggtttcaccgtgttagccaggttggtctcgatctcctgaccttgtgatccacctgcttcagcctcccaaagtgctgggattacaggcgtgagccactgcacccagccacctgttatgaattttctataaacctctactctcagttgtaaaataccctaatcaatagtgcataagaagtcagacaaagctatacatctgtagagaatcagatggttccccaggcagataacacctggcacagtaccaacagggcattttcctttttctgtttccaaagtctggatatatattttttttagatgggagtctcactctgttgccaaggctggagtgcagtggcacgagcttggctcactgcaacctccccctcccaggttttaagcagttctctgcctcagcctcccgagtagctgggattacaggcacgtgccactatgcctggcgactttctgtatttttagtagagacggggtttcaccatcttggccaggttggtcttgaactcctgaccttgtgattcacctgcctcagcatcccaaagtgctgggattacaggcgtgagccactgcgcccggcaaaaatttttaattaatagagaaaatcaggggaatgggacattgggacagactggagagagagttttaagaagggagtgatcaagtgtcatgttctgccataagttcacgatggaacttgttttgggtctagaggtttgctggccattggtgactttgaggagagcagagtccatgaaggggaaggcacattagtggggagatttgagccagtgtacacaactctcaggagaagtaggctagagggcagggaggatattaacaggctcttctaaagggttccttttctgtgatttctttcattgaaattggtcactccctctcctttatttatttatttatttatttatcgagacagagtctcactctgtcacctagactggagtgcaatggcacaatctcagctcactgcaagctccgccttccggactcaagcgattctcctgcctcagcctcccaagtagctgggattacaggcatgtgccaccacggccggctaatttttgtatttttagtagagacagggtttcaccgtgttgcccaggctggtcttgaactcctgggctcaagaagtcttcccaccttggcctcccaaagtgctgggattatagccgtgaaccaccacacccagccctctccctctgcttattccttcctctcttacccagcaaggaggggaataaaaataatggaatcctacttcccctggagtggcacagggaaaagccgtggaaaggtaatgtgagctcctcaggagaaatcagatgctccctgagggctggtaacctggtgcacttgcctgagctgatgccctgctgattgaagcagggatgttctttagtgcagtctgaagctgggtgcccgcgacctgcacgcctcacactcctcggttcatgagtgtccttgcaacatgcgcacgcccatcagtcattcaggaaaagcttccgtggttgaagaagaggtcatgaggcagctgaccctggtgggggcactgtatctatgtgccccatccactgcctagctaaattcttgtttttgtttgtttgttttgaggtggagtctctctctgttgcccaggctggatctcagctcactgcaacctccacctcctgggttcaagcaattctcctgcctcagcctcccgagtagctgggattacaggtgcccgccaccatgcctggctaatttttttgtatttttagtagagacagggtttcatcatgttggccaggctggtcttgaactcctgaccacagacgatccactcgcctcagcctcccaaagtgctgggattacaggtgtgagccaccgcgtccggccatagctaacttcttgcaaggaccatcttccctcaccttctccattctccctctctccatctccctcactttcttccccccacccccaagacggagtcttgctctgtcccccagactggagtgcaatggcgcgatctcggctcactgcaacctctgcctcccgagttcaagcaattatcctgcctcagcctcccaagtagctgggattataggcgccaccaccatgcctggctaatttttgtatttttagtagaggcagggtttcaccctcttggccaggctggtctcaaactcctgacctcgtgatccacccccctctgcctcccaaagtgctgggattctaggcatgagccaccgtgcccggccatgtctctcactttctcgatcttctcctcacctcccttgagcactcggcatcatggatgctgagggccactcccagttcctgagaccacacacgctctgctgtgatcatgccactcatggttttcttttttctccaccgctcctgccctacggcctttgcaggttcttcaacttccacaacagtggcattctgccagagctcaatcctgggccccttctcactccctcgactagctcatcacacgcatggcttccaactccacggccgtccacacgctgagggcccccgcgtctccatttccagttctcgcctctccctcgagctccagatgcgcatgtccagctgcctcctggacatcttcctttgaatgtagcaaggcgggtccattcctgcgttcgctccctccctgatcagcaccacagtcgatccaggtgggcgtggctggaagcttggggcccccctgaccccttcctctcccacccgcatggccagcccatgcatggtcttgtcactctggcctcccgcatatccctcatgtccgtctgcttcttttcatcctggccacatcctactagcatcccttgagtggacactgccacggcctcctcactgccctctcttgtttttctggttcttctattcccatccttctacattgtagccagagaaatcttcattgttgttgttgttgtttgttttctgttgtttctttgttttgagacaggttcttgctctgttgcccaggctggagtgcaatggtgccatcttggctccctcagcctcaaccacctggactcaagtgatcctcctgccttagcctcccatgtagctgagaccacaggcatgcaccaccacatccagctaatttttgttttttgtagagatggggtctcagtttgttgcccaggccggtcttgaactcctgggctcaagtgatccgcctgtcttggcctcccaaagtgctgggatgacaagtatgagccaccacatccggattacaagcatgagccaccgtgcctgggtgacaagcatgagccacggcgcctggcctgagtgatctgtcttttcggtacacatgctgcagccccgtccgctctccagcttcatctctcacgactctctcctcactcccagcatcaacacttcggttcttggaaagcaccattctccctcctcccacaggcccttgcacaagccaggctccctgctcagagctttcttccccctccttcccttggtctagtgagttctgtctgaacctcagatcacagctggaaccttccttcctctgggaagccttcctgactactctcagagagccactcaccacaggcctttcctgtaaagcgcccgtcgcttcaaaatcatccaagcacatgcatggcaacttgattcgtgtctgtctcctgcagcagaatgcgagaaccatgagagcagcgacggtgatggtttggcttagtgtctaactcagagcctggttacagaaggcccgggacaaatattgaaggatggatggatggatgacagacagatggacatatcaaaaggaaatgagacttttgcccatactagatttagtaacacagaaccccagagccaccacctccctttaccaaattctaaaccagggctattcatgtcaacccctgctgtcggtggctcacacctgtaatcccagcactttgggaggccaaggcaggcggatcacgaggtcaggagttcgagaccagcctggccaacatggtgaaaccccatctctactaaaaatacaaaaaaattagccgggcatggtgacaggcacctgtaatcccagctacttgggagcctgaggcaggagaatcgcttgaacctgggaggcagaggttgcagtgagccgagactgcaccactgcactccagcctgggtaacagagagagactccgtctcaaaaaaaaaaaaaaagctctccctctcgctctccctctccctctccctctccctctccccacggtctccctctccccacggtctccctctccccacggtctccctctccctctgtttccacggtctccctctcatgccgagccgaagctggactgtactgctgccatctcggctcactgcaacctccctgcctgattctcctgcctcaccctgccgagtgcctgcgattgcaggcgcgcgccgccacgcctgactggttttcgtatttttttggtggagacgggtttcgctgtgttggccgggctggtctccagctcctaaccgcgagtgatccaccagcctcggcctcccgaggtgccgagattgcagacagagtctggttcactcagtgctcaatggcgcgcaggctggagtgcagtggcgtgatctcggctggctacaacctccacctcccagccgcctgccttggcctcccaaagtgccgagattgcagcctctgcccggccgctaccccgtctgggaagtgaggagcgtctccgcctggccgcccatcgtctgggatgtgaggagcccctttgcctggctgcccagtctggaaagtgaggagcgtctctgcccggccgccatcccatctaggaagtgaggagcgcctcttcccggccgccatcccacctaggaagtgaggagcgtctctgcccggccgcccatcgtctgagatgtggggagcacctctgccccgccgccccatctgggatgtgaggagcgcctcggcccggccgcgaccctgtctgggaggtgaggagcgtctctgcccggccgccctgtctgagaagtgaggagcccctccgcccggctgccaccccgtctgggaagtgaggagcgtctccgcccggcagccgccccgtccgggagggaggtgggggagtcagccccccgcccggccagccgccccgtccgggaggtgaggggcgcctctgcccggccgcccctactgggaagtgaggagcccctctgcccggcagccaccccgtctgggaggtgtgcccagcggctcattgagaacgggccatgatgacaatggcggttttgtggaatagaaaggggggaaaggtggggaaaagattgagaaatcggatggttgccgtgtctgtgtagaaagaagtagacatgggagacttttcattttgttctgtactaagaaaaattcttctgccttgggatcctgttgatctgtgaccttacccccaaccctgtgctctctgaaacatgtgctgtgtccagtcagggttaaatggattaagggcggtgcaagatgtgctttgttaaacagatgcttgaaggcagcatgctcgttaagagtcatcaccactccctaatctcaagtacccagggacacaaacactctgcctaggaaaaccagagacctttattcacttgtttgtctgctgaccttccctcctattgtcctatgaccctgccaaatccccctctgcgagaaacacccgagaatgatcaataaaaaaaagaaagtcacctggagagctgaaaaggttacatactatgtgattccaacaatatgatattctggaaaaggcaaatctatggagacagtaaaaagatcagtcgttatcaaagggagaaaggagggggagagatgaatgggtaaaggacaggatttttagggcagcaaaacttttttttttttctgagacagagtctcgctctgtcacccaggctggagtacagtggtttgatctcggctcactgcaacctccgcttcccgggttcaagtgattctcctgccttaagcctctggagtagctggggatacaggcgcctatcaccatgcccagctaatatacatattttaagacagagtcttgctctctcgcccaggttggagtgcagtggggtgatctccgctcactgcaagctccgcctcctgggttcacaccactctcctgcctcagcctcccgagtagctgggactacaggcgcccgccaccacgcccaactaattttttggtttttttagtagagatggggtttcactgtgttagccaggatggtcttgatctcctgacctcgtgatccacccgcctcggcctcccaaagtgctggaattacaggcgtgagccaccgcgcccagccaatttttatatttttagtagagacaaggtttcaccatattggccaggctggtctccaacttgtgactttgtgatctgcccacctcggcctcccaaagtgctgggattacaggtgtgagccaccgcgcccggccatagcaaaactattctatgtgacactgtaatggtgaatacatgtcattatacatttgttaaaaactatagaataatacaactcagtgagtcctaatgtaatccgtggactttagttaataataatgtatcaatattggttcataaattgaagcaaatgtaccccaatgcaagatgttaataataagagaaattggggggcgggaggtggaggttgagaggatatatgggaactgtctgtctctctctctcttccttccttccttctttttttcacagggtctcactctgtcacccaggctggagtacaatggcgtgatcttggctcactgcaacctccgcctcctgggttcaagcgattctcctgcctcagcctcctgagtagctgggattacaggtgcccgccaccatgccccgctaatttttgtatttttagtagagacggggtttcaccgtgttagccaggatggtctcgatctcctgacctcgagtgatccgtctgcctcggcctcccaacgtgctgggattccaggcatgagccaccactctggccctgtcagtatcttctgctcaatttttctaaaaacctaaaactgctaaaataatttttttttttttttgagatggagtctcactctgtcgcccaggctggagtgcagtggcgcaatctcggctcactgcaagctccgcctcccgggttcaagccattctcctgcctcagccttcccagtaactgggactacaggcgcctgccaccacgcccagctaattttttgtatttttagtagagacggggtttcaccgtgttagccaggatggtctcgatttcctgaccttgtgatccacccgcgtcagcctcccaaagtgctgggattacaggcgtgagccaccacacccggcctaaaataattttttaaatataaaatatatattttaaaaaatcctgacacccagacggcatccttgaccatttgaaccagaatctctgaaggtcgacccaggcatgaggattttttaaaagctccccaggagattctagaactaccccttcgaactgaatggggctggggtggagggagcagacagactgcagtggggagccctttctcagctttggggtgggtttccgagggaggtagatggatattggcacagattgccttaaaggagcgggagcgcctgagggcatggagaatctcgtccttgtgaaagctccagtgccttaggcacggtccctcttggactctggtggggaccgagtgagaagtttggccggtgccctcctgtgctgtaattctgtatcaatctggtgaccatttcaatgaacccacctctggatttttccagctgctgaacaggccttggagggcggggtcaagcttgacaagcaggggcagggattgaggggaggcagtgtcccgccggaatggctgggcctgaagaggaatgggagcaaggtgagagggtgggacatgagtggggagggcatccagagaggctgacggggccttgagcaccaggctgagcaccgtggggaccatggcagggttctgagaggggcatggtcaggtgggtgctcagaaagatcactcgggcagccagggagggcatggaccagagggccaaggaccaaggctagaagaccagtgaggaggtgagagatggcgaggctgcatttgaggggctccagtggtggggaggaaatgagaacaagatgggcttattggtcttggtgtctggggagcttcagcctgaccaccagcacccctcctggagagggcatggtacagcccctcacgggagctttgtgggaccaccaggaagcaggcaggagcagctctggtctgtttctcagatggaaaacctgatcaccccactgggcagcctatagcctggtctccctcctggtcttcagcagctctgatggacccagagggcagcttcacccagagggaagctccacagctgggcaaataccagtcacgtaggacgtgctgagaccgtgacccccaaggctgggtccggcagccccgaggcagagaggcctttccttttaagggtgtcatttgctgagaatttaccacgtgctgagctctgtaccaggcgcttggcacaaggacttcatttaccgtcacaagaaccctgcagtactgtgaaacatatttggtttcgagcccatttcctggcatgcaactcctgaaatcctgaggatctccaaagggatagctttttcccttttttttttttttgagacagagtctcactctttcgcctaggccgaagtgcagtggcacgatctcggctcactgcaagctccgcctcccgggttcacgccattctcctgcctcagcctcccgagtagctgggactacgggcgcccgccaccgtgcctggctaattttttgtatttttagtagagacggggtttcaccgtgttagccaggatggtctcgatctcctgacctcgtgatccaccccgcctcggcctcccaaagtgctgggattacaggcgtgagccaccgcaccaggccagggatagctttttctttgctaacgaattgactggtggctggcagcccctaggtggcttcaggatggggtctggtcaccagaaagacccaggcaggattagagggttgggactgtcaggcccatcccctacctctggggaggagagagaggctgaaggttaaggtgatcaccaatggctaatgatttaatcaatcatacctaggtattgaaacctccacaaaaaccccaaaaggacaaggtttgaggagcttccggagagctgaacacatggaggtccctggagggtggcatcctggggggacatggaagctctccacccctcccccgtcctttgccctgtgcatctcccctcatctgtatcctttgccaaatcctttataataaaccggtaaacgtgtttccatgagttctgtgagccgctccagcaaattaatcaaacccaaagagagggttgtgggaaccccaacttgaagccggtgggacagaaactccagaggctgggactcatgactggtgtctgactgagggactgtcttgtaggcttgtgtcctcaacctgtgggatccgatactgtttccaagcagacagtgtcggaattgagttagaagacacctggctggggtctgctgcagaagggatatgggggtgggggggactccacatggttggtcacagaagtctttttttttttttttttgagacggagtcttgctctgtcgcccaggctggagtgcagtggcgcaatctcagctcactgcaacctccacctcccgggttcacgccattctcctgcctcggtctcctgagtagctgggaccacaggtgcccggctaattttttgtatttttagtagagacggggtttcaccgtgtcagccaggatggtctcgatctcctgacctcatgatccgccttcctcagcctcccaaagtgctgggattacaggcgtgagccaccgcgcccagccggtcacagaagtcttctgtgttcactgttgtagtgtgagagcagacgaaaacgtttgcattgtttgcattcaaaccccatgggaggtgggcgcggtggctcacgcctgtaatcccagcactttgggaggccgaggtgggcagatcacctgaggtcaggagttcaagaccagcctggccaacatggtgaaaccccgtctctactaaaagtacaaaaaattagctggggcatggtggcgggcacctgtagtcccagctacttgggaggctgaggcaggagaatcgcttgaacccaggaggaagaggttgcagtgagccgagatcttgccattgcactccagcctgggtgacagagcaagtctcaaaaaatctcaaacaaacaaacaaaacaccccacgggaacattcccattaaatcaataagggaactgaggctcctccaatgacctgccaaaggtcacacaatttttaagtagcaaagcttggattcaagctcagggctgtgtgaccttaaggatgactcttttcgtcgctgccctggagggctgtaccatgggaacagaggtgtggggtcccaaaagtctgtaccagtgtccaaggctaagcggggatgggaggtcactgggctggtgtcacaggcactcctgtgacaccacagggacctctgccccaaaagcagcagctatggctcctacccggaccagaccttggcatcctgagcccctgtgaaacaggcagttcttcccaaggagtggccacggacccgcccaggagcctcagctgtaccctggactgcagcccggtcacctcctgagccagcccttccctctccctccctccgccaagaccacttctcaccactgtcctgctcagggacttagggtgcctcagacgcttccagaaaattcaacaaagccagctgttccagctgctgagaaagaacgtatatccagatgcagaaaatgtacgcacaaaccttttttttttctttttaactcaagaaagggcttttattgtttttaactcacttcctgggaagttaatttttaaaacactcttatagagtttgctcatcgcttgtgctacattcaaaaacaacgatgccaaccaaaaccctcagtgacagggtgagcatcccacctgggcctacccctgagctttccaagggtgggtccgatcaaagtggtccccccagaccagatgctcaagaaacacttggggatcagtgattggctcttaacttgccttccactaactctataaaagtgttcttaaaaacagtaccgagtaactttttaagcttcgggccacactgccttagcccagaggagccggggagaaacgtggacccactgacaatggggcacattcggctcctagccttaaatagacgtagaaactgtattacagatgcatgtaccagtgcaggacatacgagtgagctgtgtgcaacagatgagcacgcgacatgcacccacaggcgcggagatgcagcgggatccgggtttctcccccagccagcctcccttctccaaacaagccctcctccaacaggacacccacacctgtggccaaaagcccttgtccatccatgtttccagggcagtgtccgagtcctgcgtgaccctgtgggggtcaacctctatgagcattcggtcagcaaatgccacgtcggccagccggacactgatcccagagagaaggtgaaggctgctccggaagagctgtgtctgcacgcgctccagcacccccgctctgagcaggctgactgctgatgtcctcagggtgaggcaattgccgcagaggccacctgccagcgtgcacacccctccaggttctgtgtctcgtgatccctccgacctggacagtttgtccttcgttgtaggagtgtgagtgcagctcttgggcccagatgggtaggccggtgtaggaggagaggctgggttccagttatttcagcatgcgcagggccacaggcctgtcgcgtccatggccctcggtcaaagtcagccctggtgtcttctccagcctcagctctaggggcatcatcaagggagagagtgagatgggcagggacgatgtggtgcttccgcttcaggcctctgctcagagcttgattccgttcagtccactttccagataacgccgaatgcgaaacacagtccaggaaagttagttccatccacttggctgccaaataatcttgggctgtgctgggaaccacggaagatgtaggaaagctcgtgagatgttcccaagcagggcctctccccgaacccccaggttaaaaacaaaagtaaaagacaacaaaaaaggaatcagaattctccaacactggccctgtccccagtgaggggtccgagcccccataccagcgtctgaatagacaagagctctggtgccaccaccccaaggtgggcagggtacccccctctccaccatatgcctgtggcagctgagccaggcctgcccggccccagcgggaggtctcttccgttgtggtaagcctggcctccacctgccatcttggtctcctgcctctgcctcctgccccaggccatgccaaccagccgggtggcatttctgaggctccatgggcacccggtttccccacagaatgggtcaggccaaggaggtccaagaagaggaggatggcctcgtgggagccctgcccccaagaccccaaatgacatacattccagtctgtccctggacgtgcgtgcgtggaggtcatgcagcacgatgggggaggggcgggagtggggctgcagtccccagccccctgcctgcgggggcggctgttgcatgaggggtgggcctctggaggcgcgggatgagtgtgctgccgggtggccctgggtgcatgcaggggctcaggatgcagcctcgtcttcctggacgccggggagctctgggctcttgcccccttcaccaaacccttctttcctgttcaggggacaccagggacagagggacctcagggtcagaatatgcactcagggagacactctccctcacacacacaggaatctgaatcccacatctctcaaagcccccttcacccactgccccaagcttggcctccctctggcctccctacatcacggcagttgctccttgccggtctctcagcccccagtctcagcccgcaacgcctccgtggccccccattgaccagagatgaagtctaaacctcccagcacggcctctggagctgctcacagtctgacccagctgacttccctacatcctccaactatcagcctaatcaagggccttctctctgtgtgtgtggttttgttgttgttttgagacagcgtctcgctctgtcgtgcaggctgcagtgcagtggtgcaatctcagctcattgcaacctctgccttccaggctcaagcgatcctcccacctcagcctcctgagtagctgagactacaggcacatgccaccacgcccagctaatttttgtatttttttatctctataaaaacagggtttcaccatgttgcccaggctggtctcaaactcctgggctcaagcgatccatccacctcagcctcctaaagtgttgggattgcaggcgtgagccaccgtgcccggcctgagggccttctgtgttgacctcagtcatcccccagcagatctgggtagagaggctttcattttgcatttttctttgccttgttcacagggcagagtccatctatcagtcttgggattctgtcacatattcaacagatttctatatctagttttcctcccaaaatgtctctttttaaaataaccagtaaatgggttttgatatctttaaaaaggaccaactccacttaactctactactgagtttctacaattatcccaaagtataaaaaactctatggccgggcacagtggctcacgcctgtaatcccagcactttgggaggctgaggtgggcagattacctgaggtcaggagtttgagaccagcctggccaaaatggtgaaatcccgtctctaataaaaatacaaaaattagccggtgtggtggtggcatgcacctgtaatcccagctacttgggaggctgaggcaagagaactgcttgaatgtgagaggcggagactgcagtgagttgagtttgcgccactgcactccagcctgggcaacaagagtgaaactccatctcaaaacaaacaaacaaaaaaccaaagcagtctatcaaggataaatattgggacttgatgatgaagtaaaatcttctttcaaagttaaacgtggaggctgggtgtggtggctcatgcctgtaatcacctggcactttcggaggccaaggtgggcaaatggcttgaggccaggagtttaagtccagcctgggcaacatggcaagactccatctctattttttttttaaaaagctctaccccaaattaaacttgggtcacagaattctagaattttatagctggaaagtattaagcccaatcttgtcactctgtttgccaggtacaaactagacactaaatgtatccttatcctgtgtctggcttgttccaccactagggggtgctggaccacaggctctgagtcagaaggaccaggtgtccgtccacctgctgtcctggcataattattattacttttttttcttttttttttttgagacagggtctggctctgtcacccaggctggagtacagtggtgcaatctcagctcactgcaacctccacctcccagactcaagcaatcctcccacctcagcctcctgagttgctgggactacaggcacccaccaccacgcccggctaattttttttttttttagagatggggtcttgctatgttgcccaggctggtcttgaactcctggcctcaagcaatcctgccttggcctcccaaagtgctgggattataggcatgagccaccatgctggcataataattattattttttgagacggagtctcactctgtcgcccaggctggagtgcagtggcgtgaccttggctcactgcaagctctgcctcccgggttcacgccattctcctgcctcagcctcctgagtagctgggactccaggtgcccgccaccacgcccagctgattttttgtatttttagtagagacggggtttcaccgtgttagccaggatggtctcgatctcctgaccctgtgatccacccgcctcggcctcccaaagtgctgggattacaggcgtgagccaccgcacccggccgtgctggcataattattaatggcttcccctttcactctcaaaaatgtccccatttggacgtcaaattatatatgccccctctccccctacactaagcacaattccagcatcaggggcctacattcctggatgagctcagagaatcctcccccaaccgcaaccacctccctgaagagatgacagaaaagctgcagttgggacctccaggcctctcccaggccccccacctcattatgaggctctccctgggtgcaagccacctccagcagggagcagatgtcagcttgtccactacgaggggtcccgacccttctgaagggccctcttatgagagggaggcctcacgggaaaccaacatggtggtcccggacaggcctggtgacagcgtgaagccaaggcacccggacagcgcctggcactcacccctctggggagtgcgccttccacacagagcaggccagggtggggcaaacaactcccaccagccccttccccaaagcttccctccggggccagaggaaggcagtggctgtcccaggaccacgctgtggttcaggaccccactggttttctctctgcaggtttgtgtacaaactccagcacaggccttattagcatcccagactggcttttattatagtgaagaaggtggatctgctgaggacgaggcgcacaggcttggggagctgcttttctggaccctcctaggaggtggtgaacccacaggcgtggctcaccatagggagccctcggccaatgcgggttcctctcccgtggtccaccggccagcctgtccctgcttactcactgaacaagcactcacaaagtgctgactgggcacagagccccagcaatggctgcaggcagcctgggccacttgggagagcagccaacagtccccagggccaggcagaggggccagcacccctcctctacagcccgccagcctcctacaggaagccaacatcagcctgtctgcaaacctctgccaggctgccaagggctgagggggccacagatttgaagccccagaggggctggacccagtgagagagtgacatcaagctgcatggaagaagggtcttcctgtcccatggaggggctgcgtgagctcctcatccctggaagtgtgtgtgtgagggatgctggccccaggaatgaagcaagagctgggcccaaaaggtcccttctagccccgactaaccttggggacagagatgcaaatggggccaacaccgagacctggccaagtccccaggctctggccttggcccaacgacagtgagagtgggaggatgggcctcagacctccccacccaactccagggagtgcccggcagtccctggcccaccagtacttacaccagtaggtttcctggagcagacatggatcgctcttccctccgtgcttggggctcaaacgggttcccaaaggaacgcttcctcagcatggacttcaccaggatctgaggaggacaaggcagcgtgaggagcacaggtcccaggctcccagacacgcagcctctgctccgattccccgagagcagctgccaagggggccgcagtgcgggtcccatctcaatcagcacagcatgaaatggcagaggcaagaacacggggcgctggcagctgggggcatattcctggaatggtgaggagccggatgccactggtacatgaggagggggccgggaccagcccatgaagggtccgcaaggccaggctgaaagagtggggagggccagggctggaagtgggagtccattagaagataccttctcgctacggcagcaatgccatggagggatgctgtgccatccttcccgccttccggccgccgagaagatgccaagatgctactgcagggcggcccgggaagcggctgagccgcagccggtggcccagtcagtggggctgccaggaggggaacagctgccgcagcctggctctctgcctttgtccctcctccgtgacaaggacggttccatgccgtgcccacagacacgccgactcacacgcatgcagagaggcagcggcacacttgccagtcccttcactccctcgcttgtgtccatccatcccgtcaacactggtcaccactggctgcctactgggtgctggccactactctaggccctggggccacactgaggccagaattcctgccctcatatagccttttttttttttcagacggagttttgctcttgttgcccagggctggagtgcagtggcacaatctcggctcactgcaacctctgcctccccgcttcaaatgatccttccgcctcagtctcctgaatagctgggattacaggcgtccaccaccacacccggctaattttttgtatttttagaagagacggggcttcagcatgttggccaggctggtctcaaactcctgacctcaagtgatcctcccgccttggcctcccaaagtgctgggattacaggcgtgagccactgcgcccagccatcatacagcttatattctagttgggggagacaggcgataagtaaagaagaaaaatcagtaaattatgtatgtcagtaagtggaaaggaaaaaataaaacaagggaatggcgatgaggtgtgaagcaggggaggctgaagctacagggtcagggaaggctcgcttctctctaggaggggaccctggcgtaaaaagccgaaggaagtgagggagcgagtcccgtggccatcgggggtgggactccccgggcagagggaagcgaagtctgaaggctctggggcagccccttccatggcacgtggccagagacgagtgcatgatggcgggacggtgcacgagccccgcagaaaaacagggcgggtggtggggcacaggctggaggtctgattctgagggacacagcagcccgagtgagaagcaggctctgagctgggaggtgacacactcatgccactgggaccatgctgggtgctgagttgagcattgaccagggggacagggagtgagagtagaagcaagggacagcgtgggaggttgttccagtggtctgagagagaggagatggtggctaagatcaggcaagtggtcatggggaccccgtgggagttgcctggttccagcgaccccacagagtcaagtaagcatagggggcagggattgagccagctggtcccagctgggccgggaccctgcagagggggataaagtgcaaggccaggccccgccaacggcagtggccctggctctcctcctggccttgtgcttgccctgactcacttgactgtcaggcaggggcagggcagggctctcagtggccccaggtggccacgggggactatgtgaatcacttccaagtgccaacacagaagctgagcagaggaagaggagcaaaaccgaaatgtgagcgggcactaggggagacacaggcactgtctaatggatacgcaggatctgggggagatgcaggcaccgtctaactgatacgcgggctctgggggagaagcaggcgccgtctaactgatacacaggatctgggggagaagcaggcgcagtctaactgatacgtgggctctgggggagaagcaggcgccgtctaactgatacgtgggctctgggggagaagcaggcgccgtctaactgatacgtgggctctgggggagaagcaggcgccgtctaactgatacgtgggctctgggggagaagcaggcgccgtctaactgatacgtgggctctgggggagaagcaggcgccgtctaactgatacgtgggcacgggggagatgcaggcaccgtctaactgatacacaggatctgggggagacgcaggcactgcctgattgatacgcgggcgctgggggagacgcaggcccatctaactgatatgtgggctctgggggagacacaggtgctgcctaactgatacgtgggctctgggggagacgcaggcgccgcctaactgatacgtgggctttggggccactcctccaatccaaaggctgcccaggccgttcccctgccttgtcctcggcaccttgtgcagtgcctggagaacggaagctcagtaactgtctggacggaatgaaatgcttcttccagtcacggtgactgctgccgctgagcaagggccatctatttctttctttttttttttgagatggagtctcgttctgtcaaccaggctggagtgcaatggcgtgatcttggctcactacaacctccacctcccaggttcaagcgattctcctgcctcggcctccccagtagctgggactacaggtgcccaccactgcgcccggctaatttttttgtatttttagtagaggtggggtttcgccgtattagccaggatggtctcgatctcctgacctcgtgatccacccgcctcggcctcccaaagtgctgggattccaggcgtgagccaccgcgcccggtatttctttcttttcttttcttctttttttttttttgagacgcagtctcgctctgtggcccaggctggagtgcagtggcgcgatctcggctcacggcaaactccacctcccgggttcacaccattctcctgcctcagcctcccgagtagctgggactacacgcgcccgccaccacgcccagctaattttctatatttttagtagagtcggggtttcaaggatggtctcgatctcctgacctcgtgatctgcccgccttggcctcccaaagtgctgggattacaggcgtgagccaccgcgcccggccccacgcccgctatttctttaaatcagtcactctcctcaccaagcctcctggtctcccgaccacaagacctccctctccatgggcctccagcagaatggcggctccagtggcccaggatcacagctggctggccaggcaggcctctgtccccccaaggagccaggcacagagcaaggctcaggtcccccaggccctccaggacaagggagcatctaccccggctctcttaccaccgtggtccagctggggatgagcctgactgagttcttaacctcctcctctgtcacctccaccacgctgcagtgctcctcctccgaaggaaggggctcctccccgttcttggtcacccaagggtgcaactgtcggggccgggagggcagggagagggggagaggtcaggccattaccagaatcacctggaggggtccaaagtccacagactcaaacccaacacacatgcatcctggtgttgatccctccagaaagggaaagtgactcctgttttctgtgtcccagcccagcccaagacccccagttccccgaccttgatgtctggcaccccaattctcgtctcgggattcttgtctaacatcttcaggatcaggtccttgagctcctcgctgatttctggcctggagagggcgaaggaaggagaggagggtgggaccgctgatgaggaccccttcctgtccacctctcttcccgaaaccttcgtccctcggatgggaagactgagttccggacagcaggcaggaatttcacaacaagggcttggagagcctttcctgagcaggaggtcaagtctccctccaggacagaggcacagacagagttccatgggtgctggacaccccaatgggtggcaaagatggtgaggagagtcgctttatgggacaccagaggccttcagacccactcaccacctcgtccttttctacacccagagaagatcctctctcatttgacagaggaggaaactgaggcccagggaggttagcaggctggcacagtgccagccagaagagtgcaggcagagatgggagactcagatgggagggagcagccccctcagcgccacatcagctccaactctctctgcccaaaccccagggttcttttttttttttgagatggagtctcgctctgtggcccaggctggagtgcagtggcgcaatctcggctcactgcaagctccgcctcccaggttcatgccattctcctgcctcagcctcccgagtagctgggactacaggtgcccgccaccgtgcccggctaattttttgtatttttagtagagacggggtttcaccgtgttagccaggatgatctcgatctcctgatctcatgatccgcctgccttggcctcccaaagtgctgggattacaggcgtgagccaccacgcccggccaaaccccaggtttctttgccaccagtggtcttggggagcccatccttccaagactagggagcagaaagccactctcaggactgttgacttcggttccccctgttgtcttagatgcttcatcccttttaaaattcctgggctgaggggaaagacacccctcagcagggggtatagcaggaagagaggcaccaggggtacaactgtggaggcagggagggaaggcaaccacaggatgaggaggaaatggacagaagccagctggctggtgctcgggaaagggagtgaggcggccccagacgagcgggtggcagaacccggagacgtgtgaatgctagcgccagggtgtggctttgagaagcttcagacaaacttcaggcaagagatgcaggcagatttgttgtgctttatcagggctgtccccgcctgaatgtgttggctggactggagggaggccagcagcagcgagaccagggggaaggtggctagataagtctggggaggggcctgaggcctgaatgaggcaaggggtataagtggcaacaaggcccagagacagggaagaggagggctcagcagggcttggggaccacacaggaaataagcagaagagagcaggagtcgctgagtacaagtcccgtttcattttctttttttgtttgttgttttttgtttttttttttttgtttttttttttttttttttttttttgagacagagtctcgctctgtcgcccaggctggagtgcagtagcacggtctcagctcactgaaacctctgcctcccgggttcacgccgttctcctgcctcagcctctcgagtagctgggactacaggcacccgccaccacgcccggctaattttttttctatttttagtagagatggggtttcaccgtgttagccaggatggtctcgatctcctgacctcgtgatccgccctccttggcctcccaaagtgctggaattacaggtgtgagccgccgcacccggccttattcagtttctttcttctgttttttttttttgagacagagtcttgctctgtcgcccaggctcactgcaacctctgcctcctgggttcaagcaattctcgtgcttcagcctcccgagtagctgggactacagatgtgcgccaccacgcctggctaatttttgtatttttagtagagatggggtttcaccatgttggccaggctggtctctaactcctaacctcaggtgatctgcccacctcagcctcccaaagtgctgggattacaggcgtgagccaccgcacccggcctccatttcactcctgaaatccactgctgaaaagaggagcctgggagctcaggctgtggctgccacggtggccgtcatgaggcgaaccatgcatgagcaagaggcctccccgacgtccctgctacgctcagagacctcggtcacaatgggaagagtggggaggaagagtggcttgagtcccagccccctgaccgctctcctccagagcatcctcttttccatctgtgaaatggggagcacgcactggcatcttgaagttccctgaccctgagtgggggaaggagaagttccccttgagtccaggggctgggtggggctggcgccactgaccccaggcaggcctgcggtgaaggagtggtgtgaatgatgcctgtggtcatccctggccaaccctggatctcagggttcccatccacacagtgacgttgcggagacccttggctccagagtccctcccgtccatctattcaggggtccctcccagggaacagcaccgccaccttcatatctgcaggctggggtggggtcctcagagggcaaaagctctgctaaaactcagacaccaggagcgggtggtagcccccttgttcccctgggtggacaactcactcctcaggaaacaccacgggctcattcttgatcttcctgtggagggccaggatgaaatcgtcgatgaatgggcactgtggggtggagaggcagacaaaggatgtgggtccagggcctcgacctgtgccaggggatcaacccccctcccttggtgggggcaggggtagggggcaggtctgggctcccattacatgagaaggacctcaactcacactgtaaatgttcaacaaatgttgactgaatgaatgagttgctgagggaacaatgaggctgggtgcatccaccgccgttactgccacccgcggccaggccaggccaggctgggtgcacccaccaccattaccgccacctgtggccaggcctccactcccagggcctggggcttgggaacatgttcactgaaattcccccctgccccttagtgtggtcaccagagcaggcacacctgcgggcagggatcaccgatacgtcagcgttgggtgtccccagggtccagcctcagccagggtaggggtgaaggacaatttgtcgaataaatgagcaagggagtgaacacatggctcaataagtgaatggcgtcaagggacagagggacggggagcactctggctggggcggtggcaacaccatcgtcggcacctccccttaggtgtctgctgtcctgcgactccttcgcgagaatcgctccgcaggggaccagagaaagatagaaaaagcctcttctctctcagccttctctgagccaggtgggctctttcaaaagccacttaaggacaaaaaggaagagcctgcatccgtcgcccgtgcccgcctcactggacccgccccagctctgctggcatccctggcactcaccttcccatagacaaagcagtacaacgtgacgccagtggcccatacatccaaggcctggaaagaaacatgctcacatcagtccccaacaggcacagccacctctgcccacccagctccagcgggctgcaggagaggcctgcagggaacctctttcctctgtcatgcactcactcgacaaacactccgcggtacttgcccgatgctgggccccgtgctgagtgctgaggacacaggggcggccagaacaaggcctccaccctccaggggttctggatttccttgggaaagactctaaccaggtacgtttccaactcaacaggtacaaaacctccttcatccagagggtcacacgggccgctcccgtgccacagacgcaccccaggaatgatggtatatatggaacttctgctcactaaaccagctcgggcttcaaggagtcatcccttctcctcataatccaccttcttcctgatattgcaaacagcccctgcccacacagaggccctgtcctctcacgccctcatccaccgccactgcaacaactcctctgggctcccaaacacccctgggcctccccgcgccctggactccagcgtgtgctctctctaccttctgctccggaacgccacctcttctggtatccactttctcgcttatatgagtgattctcgatctctacctacatattcctgccccagatgcatcatctgaatccaaccagggaacaccagacaaatgcaaactgacaacattctacaaaataacaggctggttgtcttccaaaatgtcaagatcaggaaagacaacggcaggccaaggccctcttccagatgaaaggataccacagacaagaaggtgaatgcagcaagtggtcctcgattggattccgggaccagaaaaagaagaagttatgaagtacagtatcaggacaactgataacatttaaataaggtctgtggattatgtatgtcttttttttttcagacagagtctcactctgtcgcccaggctagagtgcaatagcacgatcttagctcactgcaacctctgcctcctgggttcgaacgattcttctgcctcagcctcccaagtagctggaattacaggtgcctgccaccatgcccggctaatttttgtattttttagtagagacggggtttcaccacgttggccaggctggtctcaaactcctgacctcaggtgatccacctgcctcggcctcccaagtagctggaattacaggtgcccgccaccatgcccggctaatttttgtattttttagtagagacggggtttcaccacgttggccaggctggtctcaaactcctgacctcaggtgatccacctaccttggcctcccaaagggctggaattacaggcatgagccaccatgcctgaccgatatataagtcttatcaatgattaatttctggctgggcgtggtggctcacacctgtaatcccagcactttgggaggccgaggcgggcggatcacgaggtcaggagatccagaccatcctggctaacacggtgaaaccccgtctctactaaaaaatacaaaaaattagccgggcgtggtggtgggcgcctgtagtcccagctactcgggaggttgaggcaggagaatggcgtgaacccaggaggtggagcttgcagtgagctgagatcgcgccactgcactccagcctgggcgacagagcgagactccggctcaaaaaaaaagaaagatgatgaaaaagccagtgggacaaaatgtcaataattggtgaatctgggtaaaaagatataggggatttctttgtactattcttccaacttttctgtaaatttagaattatatcaaaataaaacatttcaaaaaatctttatcaacatccccaacgtctttctttctttcttcgagacaaggtgtcgctcagtcactcaggctagacaccatcacagctcactacagcccccaactcctggactcaagcgatcctcccacctcggcctcccaagtagctgggactacaggtgtgcactaccacacctgtctaatgtttttatttttttttttgtagaaatggggtcttgctatgttgcccaggctcatctcaaattcctagccttaagagatccaccttggcctcccaaagcactgggattacaggcatgagccactgtgcccggcctcctgacctctttcctggatactcacacgtgtccaaatgcctctcacccacagcctccctggcagtggggtggctggcactccataggtgaaacagccatgtgcccagggaactgcgccagaccgtgtaacctcttgttcagacaactttgcctacgctcctgtcacttaggagaaagcccaaacttccaggccctttataccctctgccccccaccctgagcccttctgttctctggtttattctctaggctccaggtcctgctcagatcctccccattcttcaagggccagttcaaatcctgccatgtcccaagatctgcggggacccccaacttcccccgaaaccatccagagggcaggaaacagggttctctttgtttctgcctcttccacagtccagtccagaacccagcacagagcaaccaacagtaaatatctgcaagggagatttgggaccactttgctggaaaacaggagaaggccaaagttgtggagtttgtcaggctccaaggaagaggcaaatatgtcactccctagacacaaagaccctggcaccctcaggttagaaactgggccactgcggcaagctattacgccccccacttgaaccccagcctggcccagggcctgcgagtcaccttcccactgaagctctggccggaatcagaaatggcctcgggggccatgaatgctggggttcccgccgtgctggacagctgagcgtcgttcccctcaaactggttgctgacgccaaagtcggcgatcttcacgtgcccatcatcccccaggagcaggttggatggcttgatgtccctgtggacgatcttctggcagtgcactgcagagaaggggagcttgagctgagcgctggcctgggcaccgctggccaggaccccacacccgtccttgcacagccagggacgccggccgggacatcccagcccatgcacactttcgtctggtgacgacctgggaggaggacgtcagggccatctgctccacgcaggtgcagacactgagcccaggctgtgagcagcagagccaggactggaatcttaggagtctttggactccaagtccagcaccctctccatgacaaacaagggatctgctgctgagtggggaggtcagaggaaactagggcaggagagttgttgctgtttttttttttggttttttttttttttttttgagacagagtctcactctgtcccccaggctggagtgcaatggcgtgatctcggctcactgcagcctccacctcccaggttcaagagattctcctgcctcagcctcccgagtagttgggattacaggtgtctgccaccacgcccggctactttttgtatttttagtagagacagggtttcgccatgttggtcaggctggtcttgaactcctgacctcaggtgatccacccaccttggcctcccaaagtgctgggattacaggcgtgagccaccgcccccagctgggagcagagttcttcctaggctagctctgccccttccctgtgagtgccgtctgcaggcccaaagccaatcaaaacctttctccagttccatcccccacccaggctaggcaaagatgtccctgctgctgggactgagagtaagattgtagggactctgctatcctacagaggtaccatctcagccctcgggatctgggctgatggggtttcagagagatggatggcaccccaggccttgggacaagcaggatgacacagctggggtgtaaggtcagccacatatagtaggacgaatcccaaatcagaaatgacctaataggctggaggtctgccctgctttctgggcccagcaccaccacgaagtgacaggtggctcaagctgacatgactggtaaggtcccagccaagagagacaatgaccccactgaccccatcccgcgaccatcgacctgtgggctccctccttggcaagtaccttcatctggaccaacggaccccaggatgctggagaggagggaggagagaaggcgagagaagaaagaggaagggagaagaggagagggaggctgcgggcagagaaggcgggtgccgtataacaataaccataaaaccagtggcactttcttgattgcctactatgtgccaggcacacacaaggaatctgacacacccttcagggcacagaagctcaggggggtggatatttgaccatggaaagtggtctcatgttcttatctcaaaccctagcctctcccttgaactccagctctttacccacatagatttccaatagacatcttggtagataactaggcagctaggcatcgatatatgtctctgtatatctgaacacagtgcaataacatgtctaattcagaacttgatttctctgcctgcaatgcctaccaccaacaaaatcaaaacaaagcaaaacaaaacgcccctgctgctccccattcttttccattctgtgaaaggccaaaaacttcaggatcatcctcaattcctcctctgagaccccacatcctgctcatcagcaaggtctgtgagctcagcttctcacatctattccagatccaactgcttctcatcatctgcatcgttgcacctgcccccatcaactgagaaccaggcctgggccaccctgaccaccgagccctctcatggcagcctcaactctctcttcttggggccagaatcacaaggcaggtcttcagcgccctcgtgcctctgttcatccacctgtccagcccctggcgctaaccgttctgccccagggaagcccttcactgtgattagctgggtcctgatgaggctttacccaagaaccaggtaagataaactcgtttctttgtggaggctaggggatagcagacaacaggacttcaggggaaagaagggactacaacaggaaggaggtggagccaagctggtacaggattgtgcctgccactgaccgtaccggggtaaaatgtccccttcccatcccatgcctctaggcccttggtagggattttctgcaaagccctcccctctgtgtgcctcagtttccccatatgtgcaaagagagtcttaatctgaaggcaaaggagaggctcgagcaggataaagacagtcctgtttctgtcactgcaggtcaaacctcagccagatccccaccctgttcccccagggaaagaatatgctcccaagaaaccaagctaagattttattttttatttttatgtatgtatgtatatatgtatgtatgcatttatttatttatttattttgagatggagtttcactcttgtcacccaggctggagtgcaatggcgtgatctcggctcactgcaacctccacctcccaggttcaagcgattctcctgcctcagcctcccgagtagctgggattacaggtgcccaccaccacacaaggctaatttttgtatttgtagtagagacaggcttttgccacgttggccaggctggtctcaaacccctgacctcaggtgatctacccacctcggcctcccaaagtgctgggattacaggcatgagcccctgcgcctggcccaagctaagattttagagatgggcatctcccctggtccccaacccacgccaggaccctaggtgtctaggggctctcctctccccagaccggcaagtcactccatgctgaccaccccacctccttcctatccccatcctgctgccactgccttaatccaggcctcaccatctgtcacttgggctgcagaaacagcctcctccctggccagctggctgcctctcaccctccgatgacacactccaatccagccaccacacagctgccagacagagctttctcaggcacaaatcccatcacgcccctccccatgcttaaagctctcagggcctcacagagctggcaggatgcagtcagcaaagacctcaggggagggattcccagccctcatgctgtggcccggacagtgtttccagcatcatctttcactaaccacggccctcctctgcccactggaggcttcagccagactccacttctccccagactcagagtacacgcctatgccaggcacatcgtcttccacgcccatccctcaaaacctgagcagggaagtctactcatccctcaggacccgaatcataagtagcctcttcagggagacttccccagccccccggcactcctacagcctctaggctccccagccttggcaggcaccacgctgtattatctgcctgcctagattcctgtccctcccactaggccgtgaactcgggtctgggtctttcacccctatgcccccaggcaagtgaatgtagctaatgaatgaaatgagacagaggccaagctcacatcaccctcctgagctcttatcagactagggcccctcacaggtaaatccaccctgccaccatgccccggccccatgccaggacagactctccccagcagctggacataaatcccttccttcccacatctcttgaagccccgtggcaacgctaagctaggctaagaactcagcagaagaaagatacagaacagccaggactcagacccacaggaccagacacgacgaaggatctggcacatgcccagtggagtccaccgcccgccccaccccacaaaaaggcctttggccccgccacacgtgcatgccccactcccactgaagctgattggcaggtcagctctgactgacgggagctgctcagagtctgctcagcctgggctctgccgcctgccagatcccctagccccagccccagtgggcaagctgccccgcactcacagtactcgaggcccaggatgacgtcccgcaggtagaggcgagcttgctcctccgagaagggcttgtcacagggcacttccatgacgggcctatggagaaggatgcggggaggggcattcagctgaaatcagggcacccggccattcaggtggtcgggacgtcccgggaaacctgtgcccacatgagtccctacaactcaagatattagctttttctgctacataataaaaaatttaaagcacacatactcatacatatcccatttcaatcataatttcaaatcagctttctcttaatttctgattggcttgatattccttcttctaagtacttaattgtccataatcaattgcaaagatgccatttagagcactgtttcaaaccgtggatccagacccaagagaggatcatgaaatcaatttagtgggtggcaactgcttttttttttttttcctaaataagtagaatatatcagaatatattgcatgtagtaaagatatatgctgctttgtaaaattttggtttcagttacagatatggatagcaatagaaatatatatttcttgttttggatagaggtcaaaacatttgaaagcctccaagtcttaaagggacaccactccctgcccctctccccagattggtctgtagggagccgcccaggcaaagggacaagccgcaggctgcattcaagccttggcagtgagggtcccggaccacccagccccgtgctcattactccatgtcatctgctctgtaaataccctgaaaagccgcatagggcagacatgtggaagcctgggctccatcagtgacttgctgtgtgaccttgagcaagccacgtaccttctctggtccttagctttccctctcacaaatgggagcaactggaatcccacccactccattcacagacttgttggaaagctgaaaaaccctttgtgatttgaataccggtaagagttgagtcccacctctatatacttttacctaaaaaacactcctttcttccccctctcctccatccctatcttcctagttcttcaaggcctgggtcaaaatccgtccccttttccagaggtctccctgactatttcagcctcactgacccccatcagccttcaaagaatggtcctcttggtctcttatttacccctaagggcagggcctccgtctctgacttctcctagagtagctgacccctgggctggggacacagggagggaaaggaaggaaggcctggatgagaattgacctgcctgatcaggacggggaactcacccctttctcaggaggtcaaacactgaaagaaaagacaagaaggtaaggtgtagctggctggcaaagcagccgatgccaaggtccctccctgttctggagggtaggagagggggcaggcatgcaggcatactcgaggcagggacaggacaggggaccctgggatatgagagcaaataaatgcatgagagtggggtctgctatggacctgtctcatctgatcctcaggtgccaggtgagaaccatcagcatcagcatggggcccttttacagagggggaaactgaggcacagagaaggggcagaaattttcctaaaggtcatagcagacaggcaggtagggtagggagtggagactaaagcctcagcctctaattcctaagccagttcttcttctgccccattttctgaggcctcctctaagcccagccctgaaccagacacaaggaactaaaataataacattactattaacaaggataataacgaatgtgctttacatataattactcatttactcttcacaggaaccctatgaggtagacaccactagtatccctgttttataggtgggaaaactgaggcacagagctacagtgtctgggaacccatgcagcctgcttcctgcatctacctgagcgcgcagcccacgtggatccactgtcttgctgctcagagggaagcagggagtggggcttggcgatatttgttgaatctaactggatattctgggcctggttctgcagggctgggcaagggaatccagggcttcagaacgtgtgtttttcttctgtccccaggaggtcagtgcatttacaccgcccacctgaaggtcatacatgtcccaagggagcccttgggccagccctgagtgagctgctgtgggaatgagccaggtcactcacccaaatagaggttgtcctcagctgggtcatccaggacctggtcagagggagcagacatgggggtggggcttgaggaggcgtggggttggaggtcccaggcctcctggtccttgccagccccagaacccttagtatgcatgcaaccaccccagacaaggaagcaggaagtgtacaggtggtgccagactgatggggcctcagaagtcaccgacccccaacctggcccgccacacgacatccagccttcctcccctccagctgcaatgaggggctcacttcttgcctctggggcagcccctcaccctccatgggaacttgggaacatccctgaccaggctgggcccccaaagccttcctgcagccccaccccaagtctggccctgtcctcagaggcctcagccacatctgccacctgggcaagatccctgggtctgtgctaggggctccccagcaccagaagcggctcccatgagactcaggtgctggttcccacctgctcaccaccaccccctacctcgatcagtttgaccacattcacgtggtccagcttcttcaggatggcaatctcctggtacacccgctccaggggcagcagctgcttggctggtcctccctgggcagcctgggaccctctcgggggagggcgacctgtgaccaggaagagaactcaaacacctgttccaggtggctgggcctcaccgtggcccccaaaccagtctcaagcaagagtcttgcatgcccgtggtcttgtcccaacccacagggcacattctgtccccaggcctctgctcacgctgtctccctctctaccccattcctagccaaaactagctcaggatcgaggtctcctcctctgcctccaggctaggagctcccagggacaggatcagaagatacatacgtggaaagccatactgcttcagtaacttctttttggaaaggactttcattgcctaaggaaggagggacagaaatgtcactactgtgcagccaccaggggctagaacaggctggtacatgtggactgaggtccggagaggcacactggacatctgctactggccctgagggtgtggcccaggtaagtgttaagcggggttgggggtggccatatctgagcctagcccttccccttattcccccagcaagcctttctggagctttcccctcagaggaatccagtctctgcttgcatatccccagggttaggaagctcattcctttgcatacccctagggacagggagctcactctcaggcagccctgtcctctatctcctaagcacaactcctgccccacccctcaggcttccagggcctggcttgggcaacacctccctcgtatccccagactcacatagtgtctgtcttcactttcgttgtaggccagcctcaccacaccgtaggcaccctgcagataggcatcagtcagccccacctggacagggcaacccctcccaggaccagctcaggaggtggggagccgagcagctctggtctctcctgcaccccatctgcactacccaccaccagctggctcacgggcaaatattgtagcagatggggaggggactcctgcgccctggtaactgcccctgcttggctccacatggctccatgcctccctcagtccctccttgtccactgtcaagaactcagagagtcgggaatcaggagccatcttccaccctccccctgggtacctgggtacttcccacagggcacgaaactgtcctcacctccaggctaggacttgcctggctctgcctcccgttccctcccacacgagagaaggagcagcgccaaacagagaatcccgaagcccccactgctctcggcctgcccactcctaccttgccaatctcactctgcagcttgtactggttcagctgcacgcagtcctgtgggggaagagcgagcaccaggtggagctgggtccggaggcagcactgctcctacctcagagcccgttcagggtccaattctggccataagctcctcattcccggacccccaggtctcaccaagcttttgagtttggatggggaagttggtggtgccatcgcccccgtatgtgacgagaagacgtggctcatgtttgaaaacatggatggtgacgccatggctgtgccttgttccccagaagcagtggtgaagggaaaacgctaattcctgtctggattctggagtctggaagaccctaatccatgagaaacccatgagcaactatttccagaagcagctgaatgagaaggtctagactccaaggacaagatgaggagccctgggcacagaggctgagagcctgggttcaggcacagaaagctcagcccctgacatctgtagactgcttggaacctgagttcactttcagacctaaatggcaagaactccagcagaagcccagaggctggaggcaggccggccgcttctgagtcacagcagactctaagaggcagaattagaggcgaggggtgcaagctggagaagagttaggggggaagggggacatagcatctatcttcacatctctaagaagactacataggggaccagggagagacctatttcctaggcctgggctgggagtgggaatagcaggacttagggaaggcagcctttggctcagctggagctcccctggttgggaagaagctatattgttaggtagtgatctccccagctctgagggtatgcaaaccaaagctagatagccgtgtggcacagacaggggcaggaaagagtcttcattgcagactactgaggggctcatgaacaacccctcgttctgccccaccaacctctgcatctgagatggccacgtggtgggactcgatggtgggcctccgccaggcccggggggagatgtggctggcaggccccgtggcataaggcccagcctgcgcctccagatagcttcctgctggccgctcctgtagggaaagcttcctggctgagaggctaggccgggctgggagcagtcttgaagtactgccagggatcacagaggcagctctggcccgtggtggggggtccacaccgtttctagtaggctctgggccaccatctgcctcctccaagtgagtcacatcgatggctgccacccgttctaccagctctgcccgaggatcctggcagcagacagctggacccccctccattgcttcagtcaagggggttcttctgcgtagccttgttgggaacctgagaaaagaaggcagagaaggcttcactcctgggtgtcaggctggctaccaggtaaggtagccacagcgctgtgggtcccacctccatgcctttgccctggctgttccctctaccgggattgccaacacccaaactcaagtctgtccctatgacctgaatgaattcacatcggttctgccgcatgccagccctctaggcctcagtatccctgccggtaacagaggcagtcacttctgcctgctggcttcacagggaagcagagagaatctgatattctggaatcaggacagacagggcagaagcctggaggcccagcagcactggaaggggcagagcccagggtcagctcagccccagcacagcatgcagccctgtgagtcatgagtcccaacccttgacagcagagcactccgacactgcctcctggaagctgagctagacactagtaactcagaagccttgctgatgcttcagacccacccgcctcctccagggagccctccttgatgtttcagcctcctacccccatccctctcactgcttccaggaagacttccctggggctcccgactccagccagccctgcctcattgacgtctgtcaaaacaaggggatgggccccacatggtggctcacacttgtaatcccagcactttgggaggccgaggcaggtggatcacctgaggtcagaagttcgagactagcctggctaacatggcaaaactctgtctctattaaaaatacaaaaattagccaggcatggtggcgtgcacctgaaatcccatctactcgggaggctgaggcaggagaatcgtgtgaacttgggaggtggaggttgcagtgagccaagatcacgccactacactccagcctgggtgacggagcaagactcggtttcaaaaaaaagcaaggggatgagaatgaggggaatgaggggtgaaacaggggcatgacatcccctgagactcatgttctcaaactcactgtgtggcggctgaaacatcagggaggtgacccccagccctcaccttcagccatgaccctgggctacatcctgaccccggactgaaccctgacactcagcctgagacccccatctctgtcccaggcttgtagagcgctggccatgcccaacctgatgcccttccccctgcttgcgctggactctgcatgttctcaggagaaggaagtgagtgaactcctgaccctccatccttcctgtctgctggtaacttcctccgaacccacacagcaactgagaacatgggtctcagggagacccagagtacgcatggtgaagcgcctgctctaccgctcgttccccatccccttgctttgacagatgtcagcgaggcagggctggctggagtccaccggccactgaggagccaggactgggttccagtcctgcctgctgacccaccaggggccctagaccagctccttcccgactctgagccccagtctcccgacttgtcctgtggattccctgccttcccatattttccaggctcacagcagggtttggaggtagactgagggtaagggtgaggtccagaccccctgtgcccggtacgcagtgtgttgaatgagtagaagcctggaggcggtggggctggtgctgacatggagaaaggaagagaggaggctccacactaggaacaggaaaagtcatggaagctggacccagaggagtgagagggagttaatgaggctggaacatcaaggaggcctccctggaggaggtgaaggaggtgaggaggctgagtgaggctagagtatcagggaggcctccctggaagagagggcaggagacagtgagtgcggctgtggcacaaggaggcctccctggaggaggtgagaggggacagggagtggggctgtggcacagggaggcctccctggaggaggtgagagaggacagagagtggggctgtggcataaggaggcctccccagaggaggtgagaggctgtggcatagggaggcctccctggaggaggtgagagggacagtgagtggggctggagcttcggggagagcttggaaaccagacagcataggaaggaggaagccaaagctgggaacaccctccaggacccgccaggctcctcccagcaggtggcccacccctccgccccttcccctcactccgcatgccttgtttttccctcccgaatgtaagtttcatgagattaggacgctcatctgccttgtctccaaaagatcatcagtgcctggcatgtgataggaactcgataaatatttgttgaataaatgagtggttgccatagtgatcgttacagccctgtccccattagacagatgagaaagcagcctcagagaggcaaccccagcaagcctcaggccccagcacatataacagaatgaactccagagtcaggagctcctgctttttggccctaggcagggactacgggactcagagccgccacaggcagaagccacaggctgcccgggcccataaaatttgcgtatttccttgaggttgccattccagcaagaggccatcctcctttacccttgaacacctttccctgcttttcttagataggtagagggaggcccagcgggtggggatgggcccggggtcacccagcaagtcggggcagaaggtttcctgttccagcctgagccctgttacccggtttggcgcccaggctctgaagccaggcagccaggctgcaccctttcctggctgggagcccgtgagcaggtggcttcgcctctgtgccttgggttttcctcgcccgcaagatggggttctagcgggcctcacctcaccgcacgtggtgagatgctgaggagggaacgcccgtaaggcgctcagaacagtgcctgccactaaggaggccgtaaaagtgagttgttgttgtgcggctgctgttgtgattgctcgggacacgctgaggcccagatggatgcgcgggcgggcggaaggcggccgcgagggctgacgtcaggctccccatccctccctcccgcctggatcaaattcaggtgactaagcgcgtctgcgagggaggcggccggccggggaggcccgaggttcctgccgcgtgtccgggagacagggcctggcgccccggccgcgtgtgtgagggcgtgtgtccccacaggagggaatatgtgtgcgcaggctgtggaccagggtggtggcgtgtgtgtgtgtgtgtgtgtgttgtgggtccccacacaggagcgcactgcatggagatgaaaacctcggtgtgatgtgtgtgtgcgcaggtgtgtttatgcgcctgtgtgcctgcaggtctccgtgtacctatgcccagggtaggggggtggtccgcgcccctgggggccctgggagcctgatcccagagctcatatctggacttttccccatagtcactggtcccaccagcctggcactgcctgctgggctggattctgtgccccgggcggaaacccaggcccatctggaggctcacacagggggtgtctcaaggcccttcccaagctcaggccttagtagatactctgtagaaacttaattcggtggataactagggccatgtgggcaaacagaaagatggacagacaggccgggaaccaggcccatggtacagcgaaggattcctgtgggcatgggcactggcttagtcctgcggccgtgaacagccagactcaagccctccctcattgggaaaaactactgcaatcctgtccccccagactggggatctgctgcctcggacaagtcatcgagcctcttggagcctctgtttcctaacacgtgcatcaagcagaaggccactgtcctgccaactcccagggcgatggaaggaacagaatgaggtgtggacacaggagtagtttgtgccacagcactgtggggctgggatgtggctgtgtctagaagcgtccaagagagccttgatgtgcaaggtccaaccccacctctgcccccagctccaagatggcctggcacatatcccccacccaggtttttcctcccaggctgtgccccaccccccaagcgtctggccactcccaaggaatgtgggcccccggctccagacgcccacttggcctggcttcttccacaggacatgccccatccagctgcatccctcaaaggagccccagagcaggcagaccctgctgccatccacgcgggttcaagtagctccacctgggagctggtcaggccctggtcaggcctcattctgagcgctggaaggccgctgtgaaccccagtgccaagccgaggcaggggaccagctacatccaggcgaggggatggacagccgtgaccagcagaggaccgaacagaagggaaagccgcagaggtggcggccacccaggccagacacagaaggtggtcctcccatgcctgggccgcctcactggagctgtgtttatgatcctggcgagtatctggatggccctggcaacgggtgccctccgcagctcccgcccccacccgggatgactcagtccccttgagggaggcccaggcgtctggtgccaagtcatgcttgacgactcctgctgtgaggacgcccgctcccaccatccctggggagcccccaagcaccaatacgggctgttgcctgactcagcacagctacccccagcgcatcgtcctggcccacccacggaggctgatggtctccaggcctcatcctctgcccctcctcatcctccacaccaggtctgtgcctccagccccactctttccagctagctgccacctccccgtccatgttcccgagcagctcagatccaacaggccccagattcaactcagcatcttccccaaacctgctcgtcctcctctgtctccattgcgagacgggtaccacaccctccccattctttcctgacccaggtcagcaatccgggagccctccttgtcactcgtcctttccctgttgcccacccttgctccccacaaccccacacttactctccactgcagccacaccacagcttcccaaattgcatactctgttctgctgccaggcctcagtacaagctgtgccttctgccaggaacacacctccctctcctctgctgcctggaggacagctcagacatcgcctcttctgagccctccttgatctccccactacctgctgggtgagctcaccaagtcaaaccccttagaagtccagattctacccactgcttcgtttcccactatgtgggtcttccctgactccaggctaacacctccaccccaccctaccccatcctccacaccagctgctggagggatttccaacatgcaaatgtggttatagttctcccagacctggccttccaggaactcggaatgtcatggatagaggagcagaagtggcctcagactgggggcaaggttggggggggggtcacaggctagggagcagccagggacatggacgcctgggatgcaagcacaaatagtcacggagcacctgctgtctgccagactctgtgcaagcctgtgtggggagatacagcagtgaaccaaaaagaccaagtctctgctctcatacagtttaatttctcgtgggggcaagaagcaacaaacaagaaagccagtgattcagatatgatatgtcaagtggtacatataggaagaaaaatacagccgagtaagaaggatcaagagaaaggggctgggagatgctgctgatacagtgtagttgaggaaggccttttgggagcaggactggagcagacacctgaaggaaggaaggggcagtaggcagtgtagttatctggggaagagcatttcaggtgcagggaccagcaggtgcaaacgccatgaggggacagtgcttgctcagtatgaagaacagcagggaggctgacgtggctggagtggagtcttccccacataagaggcacctgatagcaagaggagttacatctggagagaaagccccctcactcattgtgctggcctcagggatggcttcctagaggaggtggcacctgagctctcttctgagcactgagcaggatttcaggatgaggcgaggatggaagtttgcactgtgcatataggagagtcatttcctggctgggactccgggcttggtttgggggtggggagagcttggtggacagagcccaggaggcccccaaagccagggggaggttgtgagcaggggagtgcctcggttaggtgaggtttaaaacgactcccatggctgctgtgaggactgacggtgggagaccgaggaagaggcgaagggtccccagagtgtgtgcgcctgggacgcagtggggggtcaatttgtatgtactggaggaaagagggcagggcttggggaggccagcgccacttccctgggatcctccagcgcgcacaggctgtgtgcccctcccacactcctgtgcccgccctgcggacaccaccaaggcccggtcctgtggcctgtgacacagccttctctgcacagccctgcaacgccaagacttgagcacaccccctcccctgacaggcacacgcccgtgtccgcgtgacccgccctcacacaccactccatcctgtcctgcaccccccacgcagacacaggcacactcccgcgtccacgtgacacacgcacacccgcctccaaacagcacacgcaggtccctgcgcacgtggacacccccccagccaccagccctgcgcctcccgggccccgaagccgcagcgcccgcctctgccgccccctctcgccccagccaaggcaggaccctgcgcagcctgagccgcgcgccgccgccgccccattcatctcccaccccgcccccggctcctgcaggaagacgctccggcgggccgtgggaggagcgctccgcggagaaccgcacgtgggtgccccgggccgggcccactccgcacagacgtggcctccaccaggagccgggcgcgggggacagtgcaccggggatggatgcggtccgcagacagaagcggggaagaacgcagacggcggggcacccgcggcgatgcggtcccggcggccggcgcagacccgagcagactccgcgaggcaccccgcagacccggccccgcagacagaaggggaaggatccccgccctgaccagatcccagctccctcgtagacgcggcctggcagaccccccccgcctctcccttgcaggctcggggcaggtgttaaggcgttcgtcctcctgctcctcgcccgcgtccccgccccgccgatccctacctgggcgccgggcgacagtgtccgcggcccggcgggcggccccactcgctcctgctgcgcgccccgccccgccccgccccgccccaccgcctcgctggggcccagatcgccgagctcagcccgcgggcgccgcggctccgggcagcgctcgctgccccgcccaccgccgcgcccggccggcgctcattggtcggagcgaacggccccgccagcgccgcccaatcggagcccgggactcccgccccctcctggactaagggaccgcggtgggcggcgcggtaggggccctccctcccctgcggcggggccgacctcgccacgcccccggcgtcctggggtccccgaagtccctcccggccgcggcgtgggcccttctcctgggcctgcaggggaccgtgcttccccgccaaaccctttgcgcccccatcccggcctgcaggagccagagcgcccctccctcccgggcgaggcgcggtgcgtgcgagggaggggcgaggcccggggaggaaggccttgaatggcaggcccaggagtgtagcttctgcggggcgggggcagagaggccgagaggtggcttagcacagagtgaagtgcttgctcggtgagccggcgacaggaatggcctagcgagggccgagggagtagagggaactcagcaggacagtgaggtgaccttcgctgtggctgttcctggggactctgccgccacctcttcccctaacgcctccgcgtgtgaatcctctggcaccaccacttgccccatatccttcccccaaatctaacctcctgcgtccctgtctcgaagtggagccaggagcctgggagtcacctgctgcctccctgtttcctgctccaaccagtccatctccaggccctgccatactgcctcttaactatccctggaatcggcccactcctctccaccccacttcccctcccttagctcaggctaccaccatcttgtccctgattgctgcagcagcctcctccctggcctccagccccatccagtctcacctcctactagcctttctctccctggcacccagagcaagttttcaggaacacaagtccaccgagaggcattttctatggctcaccgtgagaataggtctaatcaagccctgtatagccttactcccagccacctgcctgtttaacgcctactcgtctttcagggttcaattcaatcctacttctgcctggaaaccttctccatgacctccccacttccagcatgggttagtggccccacccaggtacttccttgtacctggcatctgtttacctgctggttcctcattgggactgggagctcctggatggcaagcactgtgcctgattcgtccagcacacagcctgtcgcatggcacaggtgctcagtggatgttgttgaatgaataattccagcaacttgagtgtggcttttgacctcatggttcaggataccagctagagctccagcaatcacataacgcattccaggcagtggagtggagaaaaggatgaagaagagggcagagggtctgcaccagctctcttttcaggaaagttcccagaagttgccacgtggcactttcacatacaccgcttgagcttacttaacatgaccagacccagctgcaagagaaagctgggaaatgcagcttccattctgggcagccacatgcccaaccaagaaccaaggactgaattgctaccgggagaacagatatccggaacaactagtggactccaccattgagagggtggatagattgaggggcagagctcgactgtatgccaggtgctgtttacaggtctttcctcaaccctactaaaagctattattgtccgggtgcagtagctcatgccggtaatcccagccctttggaaggctgaggtggagcgtatcatttgagcccaggagtttgagaacagcctggtccacatagtgaaactctgtctctatttaaaaaaaaaaaaaaaaagaagttgttattatccttgactcacagaggaggcttggagagttaagccacttcccccaaggacacacagtgaactgtggcagagctgcaattgaaacctgtcttttccttgcacgccagacaggctgggaagtcaggaaagggtgtgtcctaggagctgctggaaggaaatctttcgacaaggaaggcttggacaacaatgtgagaagctgtcaggccaagcaggatatggggcccaagtgtctgcttaagacttggcaaccaggacactgccagtgaccttggcaagggcacctaggagaagtggttggggtggaggccaattgcagagggaagtgtggactggtctttctggaagggttgcagtgaggggagaggggcagagctgctggggaacctgggccaggaggaggcagaagagggggacagatgtaggggtaggagaatggaggtggcttctgctgggcagcctctgggctgggtggtgaggctgaatacagaggagggacccttttctgctcacttggaagggaagggggcagaaagtgcaaaagcaggtgtgtctggagaaagaagggggggcagaagaggaagttccagtcttataaaatctaaatgataggtcttggttggggaagagggcagaaggccaaggccctgagggagatggcaggggctggcctgtgttgtccagtctggtagccactagtcacatgtaactatttaaattaattaaaagtaaattgggcagtcatggtggctcccgcctgtaatcccagcactttggaaggccgaggcaggcggatcacctgaggtcaggagtttgagaccagcctggccaaccaacatggtgaaaccccatctctactaaaaatacaaaaaaaaattagcaaggcgtggtggtgggcacctgtaatcctagctacttgggaggctgaggcaggagaattgcttgagctcaggggctggaggctgcagtgagccgagatcgtgccactgcactccagcctgggcgacagagcaaaattccgtctcaaaaaaaaaatattgattaattaattaaaagtaaataaaatacgaatttcatttccttggctgcatatttccaccgaggccacctgtggcttctgggtaccctattggacagcatagatagagaatatttccatcattccagaaggttctatgggacggcactggtctagacagagcatggtgactgggtgggggatgctgcccagagatcctacctggctgtaaatccaggcctgaggtcatgcccacagcagggccctccacacagcctcagtcaagtccctcctcccctctttgggattccgccagatctccctcctggcacagccagccccttcctccccactgtttcacgaggccactcctggggttctctacttgtgccactgccaggcctctcccagccatggagggttgggaagagcgccaatgttcagggctgtgccaagatggcaacccgtggacagaggtgagctgacctctccacccagcactgaccctgctgggctcagggcgtatgagtcggctcactggtccccaccggcagatccagagggatctcagagattgcccagctcagccccacatttcacagacgagcacactgtgtttcagagaggtctggaaagagagcacggacggcagaggtttgtcctcattccctttattgtactccacccgtcgcttcccccagaccttctgttcagacagagccaggcaggccttgggagctggggctgagccacaggcagggagcccaggatttggctggggctcccaccccaacccgaggtagctgagtaaggattcatggctgggagggctgtcctggcctggcacacttggagagaagcctttccctatggaggtgacatggcacggaccatgtgtgtgtgcttgggggtgtagatgtgtgtagatggttgtgtttgcagggcccaagctgttcacatacacagtgtggaaggatgctgtgtgcacgtaggtggtgtgtacactgggttgtgtgcatgagacactgtgtggcacgtgagcacacaacacacatgctgaaggtgtttgagaccctgttcagtgtctgcacctgaacaggaagtgcaggctcagggctaagtctgactcccgctcaggagcttagagtcagaaagttcgaggacggcacttcttaaacttaggtcccagaatggcctggggagtttgccatccacacagatcatacggccagccctggagcttttggttcaggaggtctgggggtgggcccaggagcttgcattgtcgataagttccccagggaaaccgaaggccaggaagaaacagggctcaagcagggctgtctaatagaactttctttgacagtgaaaatgccccgagctgtccagtatggcagccactaaccacacgtatctactgagcagttgaaatgtggctagttcagccgaggaattgaattttgtgtttcattctattttattttagtttaatttagtcacctatggttactgactgccacatcggagagcacagatctagagaaatggaggcagcgggttggataatgagagtccggagagagaagcacgaagctagggtgcaggtgtgtgggagggtcctgcccagccccagccattccccaccaggagcggctgaggctagggtagggctccctcagggtgtgtggggtcggagccggagctcagatttgcacaggtctctcctactatgcaccctgagcttctggcaaactgctctctgcctggctgagagggtaggagacttcctggggaggcccctctgccctggctgggacccaccagggctccaggctgaagcctcacgctgcacccagtcaggagttggggcccgagcatcaggatgtcctcatgttctcctgcaggcccagggtggagctggtagctgcgaggtcacgctcagcctgtgtacgtggtgcaagggttgggggatacaagtcagtgctggggaagcagctgcccacgccccccaccccaacacagacacaagcgccggaggccttcgaagggcctggctcggggggttctcttaccgcccctggccccatgtcctcagcgtatttgaacttcttctgcttgtagtagtgcctcttaggcaggatgtgaagcagcagcaggtcacagagaactgtggcctggggtcagggaagggcacggagacagcgtgggaatccgggggtgggtacggagccctccacatcccacctcagtccctggtggtgaggccctggctggatctgacctcactggaggccagtttcctggagggtggatgaggccctgcaggactctcaggggaccaagatggttccaccccaactctgtcctgccccagctctgggccttggttttcttagatctatgtagttggtggggtgggcagctgctggctcaaaaatgatagacagttagggtcaagttttagggtgagggacgtcttgctgctactgaattgtggaagaggaggggccaaccccagcacagtgagccggtgaccccagcacttaccaccccaaagatgccaattccagagccgatggtggtcattgtagggatgatgtcaaacttcccggcctggtggcaggacccagggagagaagggctaaccgtcggaaggggcccagctggaaaaggccggacctgggacaaggggacttccccaccctcggctgtgaactgtccccacctcggactctacatgggccaccagctgctggtcagtagacctgggttttgaccttggctctgcctccctgagcgcaaggagactgtggggaggcatggccacaggttgcaaagccctgctctggacatgccccatgaccatctgttattagaagtaaaactgctggatgaacccacccaacttccggttgtctataactgtagatgcccaaaggtactcacaggagctgagaatgtgtctcagctgccaccaccctcacactggacactcaccttgccgtccaccaggatgtcaaagcgaatcccaaacaccttgaagaggtgacggtagttggtcccgttctccacaaagtgcctggcaaaccttggggaagggatgaggtggcaggagggtgatggaggggactgtcttgggtctggagttcttagcgcatcagggatacaggagatttagtggtctctgagtacagcctcatccccaacaccgggcaggatcccaggcctcattctgggaaagttgtactcaactcttgccccaactcctttttcttttttttttttgtgagacggagtctcgctctgtcgccaggctggagtgcagtagtgtaatcacaactcactgcagcctcagattcctggtctcaaagcaatcccacctcagccccccaagatgccttgattacaggtgtgggctgctgtgctcagccattgccccagctcccaatgtcagcaatttccccagctagtcctggccaggtgggcctgaaggggtctgagacccagggacaggggatttgagacttcaatatctttctccctgctggcttcctgcatggccacccaggcagaatgagagctgcccaggaccctctgctcccctctggggacactttctcagacctgaagtgttctgggagtagaaaagcccgcaggaccacaaggaagaatgtgctgctgggggcctggcagacacctgaagttgaagcctggggagagatttttctcttcgtacagcccatggaactcatagatgggtctgcagtgccgtacgtgccagtccaggtcacagtgccagtcgatggtgatgccaaccactccaccctgccagggacacaagtagttaagatctgggatttcaggatcaaaaacccctgtctcagccgggcgcagtggctcacacctgtaatcccagcactttgggaggcagaggcgggtggatcacctgaggccaggagttcaagaccagtctggtcaacagggtgaaaacccgtctctactaaaaatacaaaaattagccaggtgtggtggcgcacgcctgtaataccaactacttgggaggctgaggtagaggaatcacttgaacctgggaggcggaggttgcagtgagccgagatcccaccactgcactctagcctgggtgcagagccagactctgtctcaaaaacaaacaaacaaaaaaagcccatctcacagctggtacacgcactctctcaagaacagaccattttggagccgggcgtggtggctcgcacctgtaatcccagcattttgggaggctgaggtgggcagatcacttgagatcaggagttcgagaccagccagaccaacgcaatgaaaccccgtctctactaaaaaatacaaaaattagctgggcatggtggcgggtgcctgtaatcccagctgcttgggaggctgaggcaggagaatcatttgaacccgagagacagaggttgcagtgagccgagatcacaccactgcactccagcctgggcaacagagcaagcctctgtctcaaaaaatcaacaacaacaaaaaaaactggacattttttatttaagaaaagatactgagaaactgttttggggtagaggtcctgtcaccctcactggccttccctcccattaccctccacactccagctctctgaccatttcttgtttatttatttatttattttcgccctgctcttgtaacccagatacgtccttgttattcccttctgtttcactcgtgtgttttctttgggagcatttctcgctttataatcataagtttatttagtgtgattatgtattaacccatctcctccaagactgtaagctccaggaggacgaagctatctgtctcattcatcaccaactcctgagttcctggcacaggtcacagtgtgggaggcaagcagacaattactgcattaattaaagaaggaatctgtgaagacctggattgggaagaaaacattggagaaagcgaagctcctctgggcgaggcgagtaatgggacaggtggagataggctgagcaacaggagaagagctggaaggtggtcagagaaggggacagggagctgggaaacttgccaggagcctagttactgagaagttcccagttgaagatggcagggagattttttttttcttttttgtgagacggagtcttgctctgtcacccagactggagtgcagtggcacgatctcggctcactgcaacctctgcctcccaggttcaagcgattctcctgcctcagcctcctgagtagctgagattacaggtgcccgccaccatgcccggctaattttttatatttttagtagagacggggtttcaccgtgttagccaggatggtctcgatctcctgacctcgtgatccgcccgccttggcctcccaaagtgctgggattacaggcgtgagccaccgcacccagccctgatgacagggagatttttaggaacagggaggtctaacattcagcatgtgtgttgctccggcatcaaccccctccaggggtcaggaaactgaggcccatgggcctgatcatggccaggtccactcttcacatatggtctgtggctgcccttgcccttccacagctgacttgggtagttggcacggagcccatatagccggcaaagctgaaaatagttactatctggcccttgaaaaaaaagtttgctgacctcccttgtagacagacaaatgtgtcgtgagtgggttattttgataacatcacagaaaagggattgatttcgttcttgaacaggcaactgcaagggcaggactaataagggacacgtgctgccaggtgtacaggcttcccacgcgccaggcagcgaggcacgccaggcacacggcgtcaactctgccaggtgtataggcttcccacgtgccaggcagcgaggcacgccacgcacaccgcgtcaactcacttgaccctcggggcgaccccacgagactggcaccattattgccccccgtcggtgggtccaaaaactcacacccactgaagttaagagacttgtctgagttcatactgctcgtttggggcagagctgggatttgaacccggtcagctagttctgcgctcatagggactgcttcttcggaatcccaggtgactgcgaggatcccagggcacaggatttctcagggccataggctataggattcaagctgcctttttatttttatttatttttatttttgagacggagtcattctgtcgcctgggctagactagtgcagtggtgcaatctcgactcactgcaacctccgcctcccgggttcaagcaattctcttgcatcagcctcctgagtagctgggattacaggtgcccgccaccacacccagataatttttgtatttttttttttttgacagagtcttgctctgtccccgagtctggagtgcagtggcgtgatctcagctcactgcaacctctgtctcccaggttcaagcgattctccggtctcagcctcccaagtagctgggattacaggcgcatgccacgatgcctgcctaatttttttgtatttttagtagacacggggtttcaccatactggtcaggctggtctcgaactcctgacctcaggtgatccgcccaccgtggcctctcaaagtgctgggattacaggcgtgaaccactgtgcccggccaatttttgtttttgttttttttttgtttttgagatggaatcttgctccattgcccaggctggagtgcagtggcgcaatcttagctcactgcaacctctgcctcccgggttcaagtgattctcctgcctcagcctccctagtagctgggattacaggtgcgcgtcaccatgcctggctaatttttgtatttttagtagagaaggagatttcaccatgttggccagactagtctcaaactcctgacctcaagtgatccacccgcctctgactcccaaagtgctgggattataggcacgaccctccgcacctgaccaagctgcttttatctagtttttttttttttttaaagcagggcatcaacaaacatccagatgacaaggtctgcccacatccgttcattctgggcacctccttcgtgccagttccatgccaggacctgctgaagacatggatctgacgctcagggggccccagtatcaggggacagacccatacatatactcagccctcaccgaggagacttgggaagatgaactgggcctaaaaagcctttatcaggatcctgcggcccagccctccccacgtgcctggcaccatgctccataccttctcagccagggtgctgaagttctggcctgactcttgcaccacgtagccaagctggaagactgggcacagggggtgcagggtcttgtgaaagaggcaggtcttcatgtgggcagcattcacctcctccaccaggttgcgcctgtgggggtggaaggtgttgacagctgctgtgtgtcatccgggagggtgcccaccacgccccaaagcctggggacccctcacaggctccacattgcccctttgattccttccacgccagcaggaatggagggagacagagacagctgagagctgccggagcggccccggccagctgcctgcatttctgcccgaatttcccacgcacctgttgaccttgaagcgtggaaagctgatgctgttcttgatgaaaagagtgaagttctcggcctctcggagaagggcagggctggaggacaccacacgcactcaccgcccctccccaggaggccccctgtgtgtcccacacagagcttggcacagcagggggtgggccgagcctccgggacccgcctgcagccctgggctggtggaggggtgggtgtgctctagcgtggccaggacccaggggaatcttcagcctaggttgcgcggatggggtgagggtggggtcagaaaaaggggtaaagatcctttctagacctaggcccccctctgtctggcctgggaccctgttcttagctctctggaaggtcagagtgttaccgcgggatgtcgtcatccacctccacggggcaccagccaaagatctcacacgtcttcacagtgtcgttgaaggccacacacttgcccgtgcggatgcctggagccagagggaaacccctgggtgcctgcactaaacagaggaggccgccccagaccccttctccaggagctcccagtgacgggccactcaagcaaaggagccaaggacagaaacgtggctgggtcccggacgggcaggccaagccagggcggaggaggggagacggcaggagggagtccctcccggaggccgcctcggcgggaggggtgtggagagaggcaggtcagcaccaagctgggcctgcaggacgtcagggaccgcagccgggggactgtggagggacaggaggaggctgaccttaccttgggccttcctcttggccttcccaggggtacagccactgtcttccttgcatatgcccccttctgggtgctgggggaggcaaaagctgctggtcccaggccccttgggtggggtcctgagaagagcccctctccccaccccccagggccctagggagagcgtggggcagagtctcagacctctctggagtgacgcctgctcacagcctccttcccccatttccccccacactgctctgccgaggcgccccccgggctcatgcccagctgcccactgccaatgtcagctgggcggtgggggtgggcacgaagtctcggcaccctgcctggtacaccgtgtgctgggcgggaaggctcagctctgcaagggttgacagttgctgtgtgtgaatatgcgcccaaatttccatcactatggcccctgcaggaagcctctctggcttcccctccagtgcccctggagactttctctgcacgtcattttcccctgtgagtcccagaagggggctggcgggcagaagtcctcacctctgcgcagtagccttgagtctgcttcggggtcacgatgaaattggtcatgaccacgaaggagttgtccccctagaagtgaggggcagggggagggtggggtgggctgggagctgggagaagagccccaagggccccaccgctgccccagcagaggcccctagagcccacaggacacgcagcagccaccacaccccctgccaccaacatggggtgatatcaccaggctgcttctgcccggcattcacagaggtccagagagaaagaggagctgggctggtcccacagggacgtgggacagagtcccacccaactctgagacaggccctgtgaggggaaggtgcaaacctgagccagctcacctgggctgggaagacgtagtcagccacatcccagacctgggggccgaggccagggagctgggtcacggccaggcccttgagtttcacagagacactgctgatgaggccgctcgaggtctggtagcccttctcatagagaaacacccacctgtgcgggtggggacagagggggagttgtggttgtggcaccagctggacctgtcacacgctttcccacgccctccccagatgtgcctctgagccaccatctgctcctaaagctcctgtcttgggctagaggcaggacagcctcccctgcctcccgctgctggcctgggcctgaagttccacggtgcttttcactatgaaaatgctaattcaggacgggcgtgccatcccagcattttgggaggccgaggcgggtggatcacctgaggtcaggaatttgagaccagcttggccaacatgatgaaatctgtctctactaaaaatacaaaaattagcttggcatggtggtgggtgcctgtaatcccagctacctgggaggctgaggcaggagaatctcttgaacccaggagccggaggttgcagtgagccgagatcgcgctattgcactccagcctgggcgacaagagcaaaattctgtctcaaaaaaaaaaaaaaaaaaaaaggaaagaaagaaactgctaattcaaatactctttccaatccttttccaagaacagagtttgctggggcctggaggccaagcctcctccttccagggtgctcctccttccagaggtcccaacagagcacgaaggctgagaatatggtcttcaatgcctaacagcctgggtctaaatcccagctccatacttactgtgggatttggggtaagctattcaatcccctgtgcctcagtttcctcatctataaaataggaataataacggtacttcttttttttttgagacggagtctcgctttgtcacccagactggagtacagcggcgccatctcggctcactgcaacctcctacacccgggttcaagcgattctcctgtctcagcctcctgagtagctgggattacaggcatgcaccaccacgcccagctaattttttgtatttttagtagagatggggtttcaccgtgttggccaggatgttctcgatctcttgacctagtgatccgcccgcctcggcctcccaaagtgctgggattataggcatgagccaccgcacccggccaacaatggtacttcttgtagtgatcaagtgagtgagttcatacatgtagaaacactcagaatggggatggcacagaataaatgcagtatagacattagttgttattatgatccagccatgctgggaccccctgggagacagcgaggaaaacagagcagggaggtggtcctctggagggcttgcagcgtccagcccctcggtcgaggcactgtgggagtggctcagtcgggaggtcttccagttttcttgggaaattctggccttgccttcccagcattgagctgtcccgttcctttggattctccactttcagtctggaaggttccatgaggctaacctccctcttagccccaggagttgggcagataaccaaggcttgccaatcaatgttccatccccctagtaacagtgacgggtctaaggacacgcacatgacctgaggagtttcagcaatgaggccaggacttttctgggaattgccaggaaagaaacatcctgtctattgagtggctaagcagggtggctgcaagacgaaaactatggtagtcatctttgccaccttctggagagagcaatcctgacaatgaagctctcctagaggaaagccaggccaggagatagagaggggcagaatcctgacaatgttgtttgagcacctggattcagccatacctgaagcacagttgaaaaatctacttctggacttttcagttacgtaaaccaataaatgtccttcctttgtttaagccagttcggatttggtttctgttgcttgcaaatgaaatagtcctggataacactcctctccaggctgtggccccttcctcgaggaaagactctttttggagattcagggtaacgtgtgtgtgtgtgtgtgtgtgtgtgtgtgtgtgtgtgttggggtatggggtgtgtggctgtatacctgcagggcaaatctgtgagtgcacctgtggccagatgtatcatccccctccactccttaccctaccccgagctcacctgtccaaggggagctcaaagcaatggactccctgctccttcccccagggctcagatctggtaacagaactctccaggcctcttagtcccagagtcacctctctccctgctgcaggccccagggaggccacccaccaatgtcctcttctttcttctcatggcccacccacctcttctctaagccccctctcaccttggcactggggccaagtcacatgctcccgaagcctaagcttggtcactgctgtcccctgcaggtcccagatagcaacaggtggaggcatgacaaaggcctctgatcctcagtgtcctgagtctgtcacgctgcctccagccccatcagggagagcaagagcattgcccatccccccactggcctccttgggccccttcctccaggagggcctctggttctgtgtccaagccagaaggagctgatgcaggggggaggaggagtttctccttgtcctgggcccctctgcaggacaggccactgacctccctctcggcaccttcagccccaacagcttagcaacgtttctatctttgcccaaaacgaactttctaccttttcccaagagacagggaagctgaggcctgcaggagtggcggtctcaagtgtccccatgcttgaggcacccagcccaggactcagcccacctccactgagcaacactggcttcgacgtgtctcccaggaggcagagcacagaggggaaacagagccacctggagcccacaagccggggctgatgcaccttggagctgccggtcttgaggtcgaagggaaaggtcggtcagatctggcattcatgacctcaactctggtgataatagaatgactatgggctgggcgcggtggctcatgcctgtaatctcagcactttgggaggccaaggcaggtggatcacctgaggtcaggagttcaagaccagcttggccaacatggtgaaaccccaactctactaaaaatacaaaaactagccgggcatggtggtggcgggcacctgtaatcccgctacttgggaggctgaggcagagactcacttgaacctcagaggcggaggttgcagtgagccaagattgcactctgcaccccagcctaggcgacaagagtgagactccgtctcaaaaaaacaaaaaataataatagaatgactatggtgccaggcctgctcctccaaagccatgccttgatctggccttattgtcaccaccctgggaagacaaccaagagggcctgatgtcagacacaggcatcttcagaagcctctccccttccagaaataaccctcaccatgctttctacctcgtcatcagcaatcccccatcctggggctctccaatggccttctcaaggaagaggccacagggtggagtggctgagggtcaggtgccagccctgctgctccccagctgtgtggcttcaggctagagactacacctctctgagccctggttttctcaataaaacagaggtgacgccacctacctcaaaggcgctgcttattcattaagtgtttagtgaggctctgctacaaactcagcctgggccccaggagacagaagcatctaggtaagtgtttgggggaagcttctatgagttcttttttttttgagatggagtctcagtctgttgcccaggctggagtgcggtggcacgatcttggctcactgcaacctccacctcccgggttcaagcaattctcccacctcaacctcccgagtagctgggactacgggcgcgccccaccacgcccggctaattttttttatttttagtagagagagggtttcgccatgttggtcaggctggtctggaactcctgacctcgtgatccgcccgcctcggcctcccaaggtgctgggattacaggcgggagccaccgcgcccggcctctatgagttcttaaggaaattagcacagtgcctggcactcagtgggcacatataatgaaaacctcccattttcactgttctccgttcctccttcacaaattcctctttcaatgttgatccgcccccattccctgagtgagctgcctcagacacgctgtgtccccagaattctatctccagactgcactctcccctgagattcaattccacacattcaatcattcaacaaacatgagccgggtgtggtggctcaggcctgcaattctagcactttgggaggctgagaggggaggatcacctgaggccaggagttagagaccagcctgggcaacatagtaacacgctgtctctactaaaaaacaaaaacaaacacgtatttatccagcccctattcatgcgccaaacactgttgaacaaaacaaacacaaaagtgaacaaaacaaacaaaaatctcgcacccaagggtcttacacagatgctcctcaaatgacgatggggctataacctgataaacccatcctgagtcaaaaggctcttaatacccccaataaacccaccataaagtcaaaaaatcctaagtcaaaccacgctaagtccagatgctcctcaatttacaatgtggtgatgtcctgataaattcttttttttttttttttttttttgagacggagtctcgctctgtcccccagactggagtgcaatgaggcgatctaggctcactgcaacctctgcctcccggattcaagcgattttcctgcctcagcctcctgaggagctgggattacaggcgcacaccaacacgcctggctaatttttgtatttttagtatagacggggcttcaccatgttggccaggctggtcttgaactcctgacctcaggtgatccacccacctctgcctcccaaagtgctgggattacaggcatgagccactgtgcccggcctacgaaatctatttcgtgccaagcactaaccactatacagacagaaattcaattggatcaacctgaactcttcatctccctttagaacttgttcccctgtgtcctcgtcatggagaatggtgctgtcctcaccctatcacccaggctcaacacccaggcagcatcctcacagccaccctccccatcatgcccccacattcattggatcccccagtccttctggtcctccctcggctttcatctaaggacccagaagggctggttttgggaaggctgagacactggaggagctgggacaggtgcgggggcagctctggcatgggttgggaggaccggccaggtggctggtgggacacagggtatggccatgggccacaggcaggagttgaccagatggggcgtgtgctgtcagggagcagcagccttggggaggggcatgagcagactccaggcctgggagggaatgtgctcagaactggggcccaccctgaggcccccatgcaacccgcagacaagtcgaggggcatctgggttaagttccttgagtgcaggatcttggtttgttttgttcacttctgtatttttagtgtctagaatagtgcttggcacataataggaactcaacaaacactgtgtgttgaatgactaactgaatgtggaattgaatctcaggccaaccatttgtgtttttaattattttatttttattgttctttatttatttttgagacagggtgtcactctgtcctccaggctggagtgcactggtgcagtcgtggctcactgcagcctcaactttccaggctcaggtgatcctcccacctcagcctcctgagtagctgggactgactacaggcacgcgccaccacacctgggtaatttttttttttttttttagatacagggcctcactgtgttggccaggctggtcttggacccctgagctgaagtgatccgctcactttggcctcccaaagtgctgggtttacaggcgtgcaccatggcacccggtctgtttttctttctttctttctttctttttttttgaatacgtcaccaatctctaaaaaccaagcggtttctttcatgcataaatctcacttcccacttctcttgagacgtcggaagctctggctgtgccaggtgttacgtgctgcggcaacaatgggcagaagctgagcaggggccgccccaggcgtgaggcctgccggggtgacgacatctgtcacccgtgctcactgcctctgccttgggtcccgccccgtccccccttcccatccctgcggcctcttcacagctgtcctgcctccggtccccacgcccacccctgcctgctccaggccctcccctgctagacatcctgtcttggctcccttctgcctgcagaagaaatccgggcgcctcagcctggtgttcaaaggccttcgccatcgcccctgctctccctttcacagcctctcccttgggctccttttatggccccttcagcctagtcccagtgacaccttctctattcctctccggccccaagaccttggttcacactgtgtcccgacaggagagcctggaagggtgggcacgcaaccaggctcctccaatcagggcattccgtttccttgactgcaatgattgattggttctggggtgggcacgggacccgaccccggccaataagaattgaacctgagacttttgctggagctctggagaaggagccactcttgtgcctcgggagtggctaaactggtgagatgttagcttggagctgctggtggccgtttcaccactgtgaagacagagaacttgcctgagaatgaagcctccacagaggaaagaagagccaggaaagggagataggtcatgggcagcttcttttgagaaccaagactggacccgcaggaattcctcatcccctctcccctctaaaccttactcctcctgtgtcttcatcctggaggatccagccgggcctgaaacccacactgatttttcagttacataaaccaccggatacccccacctttccttttatttatatattcatttatttgtttgtttttttatttttttttttgagacggagtctcaccctgttgcccaggctggagtgcagtggtgcgatctcggctcactgccatctccgccccccaagttcaatcgattctcctgcttcagcctcccgagtagctgggattacaggcgtgcgccaccacacccagctaatttttgtatttttagtagagatgggttttcaccatgttggctaggctggtctcaaactcctgacctcaagtgatccacccgccttagcctcccagagtgctgggattacaggcgtgagccaacgcacccggcccacccttccttttaaatctgtttgattagacttttctcacaggaaccaaaggagtctggctaattcaccctcagttcctccctctccctctctccattccatgtcccacctctgttccccggcacagcaccaggcatggagaagatgctgcagaaacggtccctggatgtgtttctccccccaataatttctatccatccttctccctgattggtgcactctgatctccacttggagatctcagaacatgtgatttcaagaggtctgtgtggaggcgcaggggatgagtgaggacttagttgagaagagacccagagggactggagagaaagctgagagcaggccagcccagcccacagcccccaggtctttgcttatggctggttccatcagtgtgtcacctcctccaggaaggcctccctggcttcctccccactgcctgtacaccaccagggacagagagctcatcagctcttcggggagagctctaactgagaccatctttttttttttttttttgagatggagtctcactctgtcactcaggctggagtgcaatggggcaatctcagctccactctgcctccagggttcaagtgattctgctgcctcagcctcccaagtagctgggattacaggcgtgcaccaccacacccagctaattttttctatttttagtagagacggggtttcaccatgttggccaggctgatctcaaactcctgacctcaggtgatcctcccacctcagcctcccaaagtgttgggatgacaggcatgagccactgtgcccagccttaactgagaccatcttaactggatctgagagggtcagctcagctcagccttctggtctcaggcccactcactgcctgcacttgcccaggatctcctggaggagcatgactggcggagaccatggcctcggttttcctcctgagtctgtgttcttggcttctcagcctccctgctcagcctcagtaactctgtccatctctgagtctcgggacctcccacccttcgtctgagttgtgctctggcgtttgtccctctgtccaggtctgtctctgtgtccacccatcccccacccaggctttgccctgtgtctgggacacgggggcctggctcttctctcatgctcctttccatcccctggcagtgcccacaggatcagacatgaaagcaaagccctcctcaggaaacagcaaagtgctgagctgagtgcactcttggggggggtggtcccctgcaacccgtgccccacgggccggttaggaagctgagtccggagatgccaagaccaagtccaggctgggtcaggggttcggtttgccgctgtgggttcctggctgagaggtcagtgcagtactgagcagtggccagacgagggcgcaagagacagcaggcaccacagcctgagcaggagctggaagcctgggcctgcagccctgggggttgctggtgatgacggactctgccttccttccaccctctgctgtgtgacgtgggcaggccagtgccctctctctgaggaggttgcctttccagaatatcaaggctgactttggagccatgcaggtgggttcaaatcctggttagtctcttactaagctgtgagatcctggctaatccctgtggtcctgagccccacagacaccgagaagggccacatccatttggaaactgattagacagtcttgggagggaagacaggcaggaggacggtagtgaggtccccgtcactggaggtataggttcccggctgggcagcagcttggggcataggctacggctgggaatgggtgggtccctccaacgctgacagcctgtgacacacacagaggagggacctggtgcccctcacacctgcagatctgaaagcagaactagggagccgcaggggcagagagaggacagccttcccccagcctcttccagcaagggtaggctgggcctgcgcagacagcctctcccagggacggtcaggagtgatactaagggtggacttccggcccgtcctgtacctggcatcccaccatcagtgcccagtagaaaggatccacagccccttgtgatggtgaggaaggagaaggcacagcagaggcctgggggtcaggagggctcagctgcaaccctgggtttgctgctgacttgctgtggacctggaaaccccactgcccctctctgggcctcagtttccctcacaagctcagacatcacagatgtcaaattagtttctgaacaagagagaggagaggtcaaggctggggtctggccctgggtccacctggccggctctgaggttctggggactggtgggacagaaggagggctcttttggacgccagaagtttccgggggactaggacttcatggtccttgtttgggccctgggtcagcctgccctggactccatttagcagttctggttcggaaccatggtaaaaatggggagggtagagctctcagaatcacacggcaaaggcaggcaggggctactgggcacccctaggaccccagcaggggctgagccccctccagtggccctggggcctccaggagacctctgcagagtcactgtgagtggacaagatgcaccacacacaggggacacacactggccacccagacacttggccacagggcagacatgggcacagccatatgtacacataagggtacccacatgtgggcactcagcaccagggacacacacccagacacatataggcacagagctccatatgcacactcacaagtgtgccagcctctgccaggcctgtcttggctcccgagacaaccatactgcaggagcgtcccacgctgcctctgattctgcactcccagcccggtgggacaggtccggagatgcccagaaaggaactatcatccctgggaccagaaccaatctctgtcctccgcctgacatgccaacatgaaggcaccaggtattcagaatgtgagagtttctctgctccgggggcctcaaacgtccctggatgtcccttgctcaggcagggaagctggcagcagagtctgtctctctctaacttgtcatatggggtgacgggtgtggggtatggcctctgtgtgtcagtggcggcctggtttggcaggcggtcagaggtcgaggactcagtggctgtggttggtggtgccctggccctgaacaccactaaccactcaaaggaaccataacactgagccggctcctcagaacccagagactctgcctcctgttcaccgaaggcccccgggcagggcttcccctccggcctcgtccccatctcaacagcgagttggcaggattttctattctcgcacagtggcttgccaggaaggccttcccctggatggagaggaagaggggctcgctggtgtcacgcaagggatgtcagagtctggaggacaggcccggggtaggggctggtgcaggcagcgggaggcgcccggactcacccgatgacgtagaccaggaccaccagctggatcagtcggaagataacgcccaccttcttattacgcaccagcaccatgcggggggtgtcatactcgaagaggaaggcggccagctcctcctggaaccgccgtgccatggtgggccggctggggctcagaactgagccccctgcacggcctctgctctcagggtgagccgggtgccaccacccacgtcgatggtagagcttctgggggcttcctggccccttaggaagagcagggcggtgcaggtggagccagaggacaggagccagaggtcagctggaggcacttgggttggagagagaatccctgggtgatcagagcagctcttggcccctggaaggcaacagactgcaggccagcctcgcccatggacaaataaattcccaaagatagatggggcggggctggtggggccacccaggcccagccccactgcccctcctggctctgcgtgggccttgttgggcctccggaaacaggagttgttggcaggaaaccacaggccacccgtcacaggggcaaagataaagctctcagtcgactcctcaagttatcctccccccaaaacctggcaagatggagctctggccagggcctgggggaagctggagtctcctcagattaggggactccccgcgactcccctccactgccaaaatgagacctccatccccagccccatccaccaccctccaccctcccccaccagggttggctgcttcgtccctgggggtctgcagcgagcaaggcagagaggaaggaggctctgagttccagcctggcctgtgcccggtcaacctcggtgctgagctggcatctctatcccccagctctcctctcccactgtctgtcctgccggggccaccatcagagggagagaggtggcaggtgcccagccaagaccagcaccacatccgtcaccagtgccatggggggcccaagaccagccgagagagcctgacctcggagatccctggctctgccacttcttggctgtgggggctgggtgtcaccttgcctctccgagcctgcttcctcatctgtaaattggggtaataagggctgttccttctaggtcgaggctcacaggggatgggtctcagcaacacgggacagagaactggaggccaccattgagtctggggcacagcacctctgcagtccctgccttcccttcccacccccagctcgggccctgaacacaggggtttggggtgggcagagggtcccacgttggctcctcagagctggaggcctccccagccccacccctcgttttgaagatgagaaaaccaagctcagagaagagaaatgagttgcccaagctcacccggggtggtactggaggttcaagctggaagcaggggcctccctggcgagcccccacggccctgtcgtcggagccgccccacccttaaggctgataaggagtcttcttgctggcgagccatgagctggaagtgctctgggcagggagccaggccctggggctgggaatcccggcagcctgtctgaatgggggtcacccacagagggctgcccatggccccttccagcacccaggtcagtctctccttgtcaagtagatcagcctcacccctcgcggagtttctgctaatccagtgggtgtcatgggcttttctaaagaaaatccagagatgctgggagccagaactgtggtggccacgtctccccttggcctgaccttgaccctagacagttcctttcccagctgcccctgtggccattggaatgggaggcaccaggacacagctgcttgtgatggggagtggggtgggtgctgagactgtgtgggccattctgggtcccttttcagccacccttctccctgatatgcgttctagagagtgggtggggtgggagggaacggagggaggaagggagggagggagggaaaaggaagggaagggaagggagggagagagggaggaggaaagggaagggaagggaggaaggagggaggaagggagggagggagaaggaagggaaggaagggagggaagggaagagagggaggggagggagggaggggagggagggagggaagggagggagggagggagggaaggagtaaaggaaagaaggaagggagggagggaggagaaaggaagggaaggggagggagggagggagggaaggaaaaaaggaaggagggagggaaggagggaggaaagaagaaggagggagggaaaaaagggagggaggaaggaagagggagggagggaggagagagggagggagggaaggaaggaagatcaggaagttcttcctctcacatcaccaccatgtcttcttcctcctcctcctcctcctcctcctcctcctcctcctcctcctccaaggagccacacttgctgacagagagattgacggatggactgacagacttgcttggacagattgatggactgacagagcacacacacgtgattcagttacagcctaggccctggccctggccctgagaaagtggactggcctggagcaccgtctcatttggggatcttatcatatccacagtgtaccccagggacctacatttattttcctgctgctgataactccacaagagcaagacagccagctgtcggggtcaatgtctctttcactggctctaaaatgcatctttctgatccaaaggctgtgatttctcacccttgggccctgccccagcgtcctcagggacagacacctgcctttgttctgggtgtttggggctgaggtgggcaggacagaggccagagctccaccctctggagtctggcagggttttcctcacaacaggcccatgaggcaggtcctagagcccacatctgacagatcaggagactgaggctgtggggattgagtccctggcccatggtcacacagtgagtagttcccatgtctgctggtggctgagaaggaggctccccaaagtctgagggcttggccccgggcccactcgaagcctccagcacttgagagccgccagtcctgccttataagcccaaagaccgggtggccgactcgggtactgggccgggccttgtagggagacagccctgctgccaagcactcggccccgggacagcctccccggcctggctaaatttagcggctctgtgcagcgtggaggctggaggccggctggagccctcgagggagcagacacgggttccaacaggtctccttagtcactcaggggcccgaggatgccgcaaccataccccagtcaaaccgtgatgccatctgggccagagattcctctaatgccacatagccccttagaccctgactggagcagggccctgggccagcctggcagaggctgtcaaggggaggttgggggagggccgacagctacggggaggcctggggagtacagcgtgggcccccatgtttggcgtctcccattgcctggacccgggctgcttctcaggcctcttctatcccccaactctgggtgtgacctggccgaagcccccctcccgtgtgtttaaaatgtcccaccctcctggtcctcctccatccctctgggccatttcccttcatcctcggcctctctctgccctggattaagagaactcctgggaggccagggctggtggctcgtgtctgtaatctccgcacttcgggaggctgaggcaggaggattgcttgagcccaggagttcgagaccagcctgggcaacatagggaaatcctgtctctacaaaatatacagaaaaaaaaattaggcgggcatggtggagcatgcttatagcccatagctgcctgggaggccgaggcgggcagaccacctgaggtcaggagttcaagactggcctggccaacatggtgaaaccccatctctactaaaaagacaaaaattagctgggagtggtggcgggagcctgtaatcccagctattagggaggctgaggcaggagaattacttgaacccaggacagggagattgtagtgagccgaaatcgagccactgcattccagcgtgggggataaagtgaaactcagtctcaaaaaacaaaacaaaacaaaacagaaaaaaaattagctgagcatggtggtgtatgcccatagtcccagctacttgggaggctgaggtgggaggatctcctgagcctgaaaggtggaggctgcagcaagccgtgatcatgctactgcactccagcctgggtgacacagcgagagcctgtctcaaaataatacattaattaaataaaaataaagaggactcctgggggctgggctgggccctgcccctcaaacacccagtgctgagcactcaggtgggagacctgcccccgcccaccgccagctcccaatcctgctgacacctctacaccagcatggtggccacatccacctcctctctggcactcacctctttttttctgtttctttttctttttttcttttcttttctttctttctttttttttttttttttttttgaggtggagtctcactcttgtcatccaggctggaatgcagtgacatgatcttggctcactgcaacctctgcctcctgggttcaagtgattctcctgcctcagcctccggagtagctgggattacaggcacccgccaccacacctggctaatttttgtatttttagtagagaccaggtttcaccatgttggccaagctggtctcgaactcctgacctcgtgatccgcccgcctcggcctcccaaagtgctgggattacaggcgtgagccacaatgcccagcctttttttttttttttctttaaatccaactgtcttggggtgtaattcgcatacaataaaacgcacccattttaagcacatggtttgatgagttttgacaaatgcaccagccccctccaaatccatcagcctagaacactcccgcctcccgtttgtggtccatctttcctcagcacccccaggcccaggcaatcactgacccgctctgtcactgcagatttgtgcagtctcgtccagagcgttagggaggtggaatcaggcaggaggagctccttcgcgtctggccgcctttgctcagcccagcggtttaggcttcgggtggcagttgcgtgcatcagtggttggttcctctcggttgcgtggacgtactgcagcttgcttatccttcatctgttcatggatatctgaggcctgtgctgggtgaagccgctgtggacactcgggggcctttgtgcgcatgtccagcttcccttctcctccctgctgtgattttgtgcctccatttctcctaacacagccccaccggggtccctcccaccactgtgaggactggagcgtggggtctggggagcacagagtcctggtctctggaggggcagggtccccaggagggttttggtagttgccagttagaagcgtgccagggcttgccccggaattccctcctgggtgaccagctgtgaggtaaggagacctctgtttaccttggccgccccatcctggcccgtcggctccgtgctgtgggctggacggagctggactcaggccggcctgggcgggggtggaggcagcgtggctgggaagcctggagccgaccgccttgtccgcaggacccccagcccatctgagcctcacagcctgcctggcccccgtgatgcaagctagatgctcagatcgtcagagggccttggggaaggcatggcccgcccattctgggcctcgggctcctcatccgtaaatggagccctagcccttgcctggcccatctcccagggctggctgaagacaccgggagatgaagtgtatgagaaggtcctgtggtatgagaggtcttacgggtggaccatgtggagggaggcgccttctgcctaccctgctcctgctgtgagctcggcgccaaccccaggccccctgctaaggaacctgggagctcctgggttgggggtgggggtgctgcctccaccgacaagctggcatcatggacgtgtgatccaagtacctgcaccaggccccgggctcaaaaacgctctgtgctggggccattttccctcattcccggcctctctctgccctggattaagaactcctgggggctggccctgcccccaaacactgagcactcctctccagtcctgagggttctgacaccaccacaccaacatgccagccatgtgcccacccacctcttctgtggctacctctttttttcccttttaagtcaaactgtactgcagtgtaattcacaaacaataaaatgcacccattttaagcacacggtttggtgaattttaatgttcttttttttttctttttttttgagacagagtctctctctgtcacccaggctggagtgcaatgatgtgatctcggctcactgcaacctccgcctcctgggttcaagcgattctcctgcctcagccttctgagtagctgggactacaggtgcccgccaccacgcctggctaatttgtgtatttttagtagaggcggggttttgccatgttggccaggctggtctcgaactcctgacctcaagtcattcacctgcctcggcctcccaaagtgctgggattacaggcatgagccaccacgtccggccatcatattgaatgttcttctgtctttgtaattcttgtcatttttggtcaaagggttccaggttttcattttgcaatgggccctgcaaattatgtagacaatcctgcctctggccctgtgggcagggcctgcgtctccttcccaggatagctgagtgaaggattagatactaagccttcatgatgggttttggtgaaacgagggccatggcgactcccttccctgagccccggcttccaggaaggtagggccacctgtgcgagccggctcaccccaggcagcctcgcagaggtccctgggtattgtgagctgagggaagccctggggaggtggtaggtgtgaggtgcatttgagctgggcttggaagggccaaaggtggatgggatcctgggatttgaggaggagagggagatagagcaggagagctgtaggacctacagaagagctggggttgaggctcctctgtgggatgcaaggggcccctgagattcaggctccgggcccagccctgccccaggcccaatcatggaactctcccaggctgtttcctcagggggtgacatgcagatcataaaatgcataaaaggggctgggcgaggtggctcacacctgtcatcccggcaccttggaaggccgagcaaggtaggcggatcacctgaggtcaggagtttgagaccagcctggccaacgtggtgaaaccccatctctactaaaaatacaaaaattatctggctgtggtggcgcatgccctcccagctacccttcaagctgaggcagctactcgggaggtggaggttgcagtgaacctagatcgcaccactgcactccagcctgggtggcagagcgagactctgtctcaaataaatacataaataaacaaataaaataaaatgcacaaaaggccttgaactcgtgcacaaattgtcaacaccgtccctgtgaggagcgagcatcccaagctgggaggctctgcgggcgctgcacctgccactcgagtgtggctctccagagccttgtcttgggggccaagggagcaatcctggtgatgtgtgaaccccagacctttgctcagcgtttcctggactgggtgtgggcaggtggtatgggcaggtggtatgggcaggtggtagggccccaggcagacgccccataggtggagacggcgggaccactccccaggaaaacagacgctgaggatcctccgttcccccagtcacacaacctttatttctctaccaaacagcaggtcagcaggtgggtacagggcccgctcctgctaagacctccccacctccccccaggaaagaagcagagaatctctgcaggcaccagactccctgcctcccccactgcgtttctctcactggccgcccagaacctgtgagagggaggaggggtgaggcgtaggggagggggctacagaacatggagcccattggtctgcaaggcaggctgaggggctttggatgtgggggactaggaaagggatgtgagtcttgatttacatataaaatcatcagtctgcacacgctctaggagtggccaagacatagggacaatccttggtgcaggtttctgctacccctcgctagtttttgccaaagtagcaaaagctgagttaagagaaaaattctgtccatcagaggccatcttcctctcatctgatatgacgtgttcctccagcagggagggagggagagcgggtgcccttggggaatcagccatccttagtgacatcctttcggctcatgggtgtcgtggggagggggcaaggagtgaggccaagagtccaggaagcccaccaggctcagaggcccccagctgtgcagacagcgcggcggccgcacactgggctgggtagaagggcgccacggtcaggaacctgaggatgtcggtggtctcaggtaccagggacgcgggtggcaagttggacctctgcgtggcagaccgggcggcagtgtgactctgaacatctcccgagctcaggacggggaaccctgagtccaggaggcgcgcggggctgaggcagtccagccaggctttcccgacttgtctcccgggaaaggacatcctcgctccgccctcctgccggctccttgtgtccgtctctctgacccttcacccgcccgggccctgcacatataaacagaagcagcctcgagctctcgggagccgactttgtggaagcagagtggagtggagggggctgcccaccctcgctgtacacagctgggcccagatggccccttctgatcccccagggctgacccagtcccagaccaggcacgaagagagaggtcagagccggtaagaaggacccccagagtcctccgtcagtgcagaggcaccagtcaccaagtgaacgtccagcttccgaacaagggggagcaagctccagctgcactcgtgatttgggggtgggggggccccggatctctgggtatgctgccagctccggcttcttggctgccccctcccagcctgcagctcctgggccagagctgcagagcagggaacttcccaggagagtccaggagacaggaattacagacctcccaggccagaaggaagtggggacagagaccccaggacggggcccggggatggccattctgacctcgggcctgtcatttatccggcgggacccggtgggcaagtgggcgagtgtggtggcaagggtggggggcggaggcgaacacatgggcaccatcagtctgaggtacacaccggagactccactctgttcccagcgctcacttctggctcatttcttctggaagaaaaacccaagagcgcgttaagatgtatgtgtaagggcacacatccagacagcttccttccagccccttccatcctccacttctcccaggacagccccaggctcccaaggcctcccttagtccagacctcagtctaccccagccccaccggaccccccaagctgcatccaggatccatccccgcaacgtcccccacgcctccttcactccactgttccatcagcacccccaaaccctccagtacatactctcctggttttcattttggggaatcaccacccattatcgtaaggttcagacaccaggctcatccttgcttctcttgcccatcacacacacccaggcctgatttcacccaaattgcgagagctcatctctcccactgccttccccaaccaggcctcaaggcctcaaggcctgccgccctgcccccagccccagtcttaccgtcccatcatacttctgcccctagcatcaagcaaaagccgaaatccagtcccaacaccccatttcatggttcctcactgtcctcagagtaaagtctaagcccgcctgtaacctcccagatctgtccccaatacaaccaccacagcccagcccccacgcctcccctgacaactgctcagccacacctgggcagagccaggaggtggggtgagaggaccgcccccagcccccagggctgacccaggatccagaattctccccaggacacatccctcgtaaatgacataaatcacggggaagccacaagcatcaggcttcagaaaaacttccctaaaaggccacccagctggcttgggagcgcaaagggtccctctctcacccccgccccgtctggctttaggaggccccagggactgcagtagcgctgggcagggctgtctgggcttccagtgagcacattcctcggggtgcctccaccccacccctcagatggagccgcaggtacccagcctgtgtctgtcctccagcagccaggcaccacctttccaagccaaacttcacagggaccaccgtcaacatctcaaggaggtggaggtggaggtgctttctggggccagctccccagatctgttcaatgccgctcgcccacctcctggtgttagtctcaccctctctttttgggggagagtgggggaacagagttttgctctgtcacccaggctggagtgcagtagctcaatctcagctcactgcaacctccacctcccaggttcaagtgattctcctgcctcagcctcccgagtagctgggattataggcacctgccaccacgcccagctaatttttgtatctttagtagagatggggtttcaccatgttggccaggctggtctctaactcctgactcaggtgatctgcccacctcggcctcccaaagtgctgggatgacaggtgtgagccactgcacccggcccgttagtctcaccccctcttgcctgtcctccatggttgacacagtccgcaccgtgcttacactcctcccgtgcttccccactgccctgaggacaatgtccagggtctctaccttggcactcaaggcccttgcccctgccgggcctcacccctctgccctgcatgctgagtgtcaacatctgtgctcacccagccctgttccaccaggttcaatcctgttctttccaaccactgctttaacctcaaagcctggagaaactccccctcactcctggcccagcaggaatctctccctcccagccctcctagcctgtcccctcccgctaggaccctcccgctctttaggcctggggaatcctccaccatccagcagccaatgctgaaaggcatctgagacacaggcttttccgtgctggctgagacattttagccatgggcataattttctcacttttaagttttctcaagaaaatctgctgagctcctaggcagttgtggccatttgggaactctcccgaggaagacaagccacctgagctgtcatgtccccagaggcctggctctgcaggtgagtgagtgtggtcaaggacggcccagaggcctggctgtgcaggtgagtgagtgtggtcaagggcggctggaggatttcctggcggaccggcccggtgctccggccagtgcagggatgccttgggcccccatggatgggagtttccagtgtctccccagggctgtcacagagcattggccagaaagaaccagacagggggcagaatggccttgctcagctccccccacccccacccattggccccagcaggcttgccttggctgagtgcccacctgcaccctcgagtgagcccctacatgtgtctggccactccctggacaggccagctcccttgctcagcccctagggaatgacagacgcgtgatctatttatagtccctccacccactcccctggggcacattcctgccagaggtggcccccaacgacccagctgccccagtgcaggcctcagccactgcccagcccaacctaggcccctgcacagcagtccagccatacggccaccgcctctgcgcaaattcccaggaaccggagctcacccctgcttcctccctctctgagcagctctgacagcgagacgatgctgtgtccctggcccttggaagttcagaatcacccactctcagagcccacctggcagaggcaggtggatggaccccatgtcccagcccacttctctccagcccgacacctgccatcctgtcctctccactccggggttaaggcagacccagagctgtgagctcagaaacaaccctccccttgacccacccacaaggtgataccaaagaggccaacccggtgtggtctggggtccaagaggtggtcagcggctgcctactccaggcctgcgagactgtcctgagaaggcctggataaagacaggctgggtgcagaggggtcagaggctgaggcccagaagagcacacagtgccctggccatgtagggggtggcaggtgaagacagtgaggcagtgtggcccaagaggtgctcccgttgctggcccagtgagcccaggtcccctgcagtgcaagaccctgcggacaccttgggacccagccaccagagccccttcacaccctccacttggtgatccgagaacgcctccccgatgtgcagacagagaggctctgcgctccacacccacagcgtccactgcagcccaggagcagaggcgggcggggaggcaggctggaggcgggacggggcctcccactcaccgtgcatgtggttccgggacaggtacttgagggcctcatccagcaggatgacaggcagagatatctggagcaccaccacccactggcgcccgctcagtggggtcacctggaaaatgagctggcggggaggggaagggaggtttggttaaaggaaggactggctgtcccgtgccccagccatctgctggccttatccacctgggctctgatggactcttcatgagcgctcctaagaaccccctggatgcacccccgatctttgtccactcagctgcaccccccgatctttgtctgttcagctgcaccccccaatctttgtccgctcagcttcctctgcctcaagggcccacctctgcccttgcccactgggtcaactcccatccatcctgttgggaggcgggaggattctgccctgggaaagctcgtccttcctcccaccccagcctgggcacagtcccctcagcaaggggtttccccctcttccgtcccccaggtctgggagctcctgaaggtggggccacagctggaggtggtggctggccagacctctcacctccctctcctccaggtagtttccattgcaggggggccagagaggtccagtgaccagcccagggcctgtgatgtccagggaccagggcagtggggcaggcggggtgactcacaggcaggggcggcacgagcaggatgaggaagtgcagggccatggacatggccacagccaccagcagccaggggttcatccagggcggcatccgcagcagcgactggttctccgagacgctgccagggcacagggtgctccccttaggccggggtgcagggaggccctgccaggcacccacccccatgggaggagcctcaccacttctctagcggtgcattgctgttgcccgctcggcctgccagggcctgtcccgggctgggacccctttctctgcccctcagacctaatcttggccgatttctttggaccccagtttcagccttctttgtctcctgggccccaattccggtccccatgaactctcagaatcctctctgggcccctttgacccttaggccccaatccagatccccaaatctttggatcccaatcttggacccccactgacccccagaccctaatcctggaccccgcttggccccagacctttgttctggacccctctaactcccagacctcagtcctggactcccctgacccctggaacccaatcctggacccttgaccctctgatcccaatcctgaaccccccaaacatcagaccccaacctgaaccccttgaccccagaccccaatcctggacctctcttgacccctagaccccagtctgggatgctcttgacctctggaccccaatcctggacccccttgaacctctgatcccaatcctgaaccccccaaacatcagaccccaatcttggaccctcttgacccacagaccccaatcctggacccctgaccctcagacactgatactggaacccccagccctcagcccccactcctcggccccagctccaggccctgcgcccagcccacctggacccctgaccctcagacactgatactggaacccccagccctcagcccccactcctcggccccagctccaggccctgcgcccagcctacctgttgagggcattgcacatttcaatggtcacgagcacggacaaggccatggtggtggggaagcgtgactcgaacacctcacagtcgatgccggcaaagagcgggttgtcttcggagcacttcaggaagttcctctgggggcaccgtggcaggtcagagagagcggcaggtcaggcgaggggctggtgggtgggaggagggaagcctcatcctgcccttggcccacgcctgggcacaaccagcacacaaaacactgccgtggggtgggctggggatcccgggaggggtgcggggtcggggcggcggtggggagagctgcaccgtgccagggagaagcaagggcacagcgtgggaaaggcagacgttctggagcaggagtgcagcggctcagaaggagaacagctggcattagcctggggaggctagcgggagcctggagatcactgaatagggaaatgcatgtgaaaatcaaccaacaaaaccatgcgggagtggaattcacctttgcggtatagaagatgaaggctacgcaggccctgttcactgttattaagattccatttacagctgggcgtggtggctcatgcctgtcatcccagggaggcggaggcgggtggatcacctgaggtcaggagtttgggaccagcctggctaacatggtgaaaccccgtctctactaaaaatacaaaaattagcctgcgtggtggtgcgtgcctgtaatcccagctactcgggaggctgaggcaggacaatcacttgaacccgggggtcagaggttgtagtgagcagagatcgcgtcactgcactccagcctgggtgacagagcaagactctgtctcaaaaaaaaaaaaaaattccatttacacctcatacctcactccatttctgccactgaaactgaactctatcagatctgatgtgtgcttctgacagagactaatgaattgccaaggtgcagctgtaacaggtagcttctctgtaattaacatgaagcgctcagggctgataacccctatagcctcaggggagttttcttactgctcaaaaaccttgttcacagaatcgtgctaagaggctgaacggagggtattgggggaacttgtcttgttctcttccatattatagggatgagggtgaatgtttccaaccgttaaccagcttagttcaccaaaaatatagatcctgctcttgggagtctaatctgaacatggagatcttttttcttttttttttttttttgaaacagagtctcgctctgtcacccgagctggagtgcagtggcatgatctcggctcactgcaagctccgcctcccgggttcacgccattctcctgcctcagcctcccaagtagctgggactacaggcgcccgccaccacgcccggctaattttttgtatttttagtggagacggggtttcaccgtgttagccaggatggtctagaactcctgacctcgtgatccgcccgccttggcctcccaaagtgctgggattacaggcgtgagccaccgcgcccggccatggagatcttttaaattagaaattggggccatgtgctgtgaacataatcctcaaagaaaaacgtgtaaaatgcccggctgtctgatctactgtctgtcgcataaatacatccgttttcccacactgcacaaatgcagataaggccactctgagtatcgtttctcctctctcgtgcaggaagagaaataagcctggctagatattttaacaaagagatagagaatctgataatctcttaaatcgatagtggacgttttctccaaaactcaagctccagcatttgaggcaagtggatatgtcttgttttctttttattttgttttgttttgtttttgttttcgagactgagtctcactctgtcaccgaggctggagtgcagtggcgtgatcttggctcactgcaacctccatctcccaagttcgagcgattcttctgcctcagcctcctgagtagctgggactacaggcacccgccaccacccgtggctaatttttgtgtttgtagtagagacggggtttcatcatattggctaggctggtctcgatctcctgacctcaagtgatccacccgcctcggcctcccaaagtgctgggcttacaggcgtgagccactgtgcctggccttgttttgtttttgagacaaggtctcactcccatcacccaggctggagtgcagtggcacgatctcagctcactgtagcctcgacttcctgggctcaggtgattgtcccaccgcagcctcccaagtagctgagactccaggcctgagccgtcactgttggctaagttttgtcttttttgtagagacggggtttcgccatgttgtccaggctgctctcaaattcctgggctcaagtgatctgcccgccttggcatcccagagtgctgggattataggcgtgagcagccacacgtttctatttggtgctgatcatagagaagggaaaacctccagaactttgaacctgactctacccacccagtgaccgagaggaccaaatcctcctgccaattgtgccactgttgtcgggcctcaccctgccagatcttaatggcctatccatacatgtacacacaaacatagggacacacacctcccactcgggcatgtgaatgcttaagacgcttatgcgtctacacagagaagaaaataccaacaagatcatgtcaggatgtttcggccgggcacggtggctcacgcctgtattcccagcactttgggaggccaaggcgggcagatcacctgaggtcaggagttcgagaccagcctggccaacatggtgaaactccatctctacaaaaatacaaaaattagccaggcatgatggcgggtgcctgtaatcccagctactcgggaggctgaggcaggagaatcgcttgaacccgggaggcggaggttgcagtgagctgagatcgcgccactgcactccagcctgggtgacagagcgagactctgtctcaaataaataaataaataaatatgtttcaatgggtctgttgctcttgctgtaaatgccctgcccagtgcagaccttctgggtttcaccagcaagcacctgccacacacacacagtattccccaggtcataggtctcggtgtggcctctggaattattcattagaaggtgcgctggggtccgggtgccgtggctcacgcctgtgatcccagcactttgggaggctgaggcgggcggatcatgaggtcaggagatcgagaccatcctggccaacatggtgaaaccctgtctctactaaaatacaaaaaattagccgggcatggtggtgggcgcctgtagtcccagctaatggggaggctgaggcaggggaatcacttgaacccgggaggtggaggttgcagtgagccaagattgcaccactgcactccagcctgggtgacagagcgagactccatctcaaacaaacaaacaaaaaaagacagtgcgtcgggctggagcttctgcctcacaggcacatggggaagccctggaggagcccatttctactggtgaggccactgctgtgcccactccttccctttgcctgcctgcctatgtcctattccctgtgtcctgcaagaccccctttggtttggttttcttttcttttctttttttcttttttgagactgcgtcttgctctgtctcccaggctcgagtgcagtggtgcgatctcagctcactgcaacttccgcctctcgggttcaagcgattctcctgcctcagcctcccgagtagctgggaaaacaggcatccgccaccacacctgggtaatttttgtatttttagtagagacagggtttcaccatgttggtcaggctggtcttgaactcctgacctcaagtgatccgcccacctcggcttcccaaagtgctgggattacaggcgtgagccaccgcggcaggatgtgttctttttttttctagagacagggtcttactctgtcaccaaggctgaagtgcagtggtgtgatcacggctcagttcagctgtgacctcctggactcaactgatcctcccacctcagcctcccaagaagctacaggcacacatcaccgtgcctggttcatttttatttttatttggtagagatggggtctcactgtattgcccaggctggtctcaaactcctgggctcaagtactttggcctcccaaagtactaggattacaggcgtcagccaccatgcccagcctcccctcgattcttttttttttttttttcttgagatggagtcttgctctgtcacccaggctggagtgcagtggtatgatcttggcacactgcaaccgctgcctcccaggttcatgtgattcaactgcctcagcctcctgagtagctgggattacaggcgtgcaccaccacgcccagctaatgtttgtatttttaatagagacggggtttcacctcgttggacggctggtctcgaactcctgacctcaggtggtccacccacctcggcctcccaaagtgctgggattacaggcgtgaaccaccgtgcccagccctcccctccattcttgatctcctcagtttgaccctctgcctaaagtcccaccatttaggggctcattcctctgaggcctcaacgttttaggggtcccttgacaaaggtaagatacatctggcagtgaggcctcttggtccccgctaactgactgggatggggaggcgcctttggcttgggggtccgtgctggtgtctctgggtttcccgtgggctctgagctcggctccccaggtggggatgtttattcgtgtatagcgagtggggaaggacactgcaggccacccatgcggctctagacccatctcccctggaactccaacaactcgagctgtaagttcaacaggctccctggccagcccttgctcaccagctggtagaagttgatgtgaggtccctcggcgtcatacacaaaccaccaggtggcggcagccactgtggccaggcctacgtacactgcggggaagggaggagaccggctgtagagaatggcggtggttttctggcgtctgtttcccctgcctaataattccctgaattccctgcagggagccacccttttcctctctcagccctgtggtttgcaggcacctcccctcgatgccagtggtgggccctggctggtcaatcagcatctgccatacccttggccccagtgcttggagatgagcaggtgaaccctatgtgggccaatgagaacaggcctgttgagacttttttttttttttttttttgagacggagtctcactctgtcgcccaggctggagtgcaatggtgccatctcggctcacagcaacctctgcctcctgggttcaagcgattctcctgcctcagtctcccgagtaggtgggattacaggcacctgccatcatgcccagctaatttttgtatttttagtagagatggggtttcaccacgttggccaggctggtctcaaactcctgacctcaggtgatctgcctgcctcggcctcccaaagtgctggggttacaggtgtgagccacatgttggccaggctggtcaaactccagacctcaagtgatctgcccacctcggcctcccacaatgctggggttacaagtgtgagccaccatgcccagcccaggcctgagattcttatcatactaccgggagagcagcatgataaaagactctctcttctgctgaatttggggttgtaatggagtgagcagagggctggggctgcagcagccattctgccaccatgagggacgtgggcctgagaatgaagctgaggcagtgccaaaatatgccagtgatactgagacccagatcccgccatgcctggtcttttccattacatgagctcatacagtttctactggcacaagccaggctgagtcacactgtctgcagcttgcaagcctgatacaaggctcttaggaagcttaggaattccacggagggctcaggccccactcacctccgatagccaggtatcggaagaagagccagccactgatgagggcttctcgggggctccggggcagcttctccatgatgtccaggtctggcgggttgaagcccagagccgtggcaggtaggccgtctgtcaccaggttcacccagagcagctgcacagggatcagggcttcgggcaggcccagaattgccgtgaggaagatgctggaacagagtcatgagctctagccccggtaggcctagcccccggcagatgcaggctccagctcctgctcagacccaaggctgggagctcacccacccactgtctccacagcagcccctcctccctccgccagctgtgatgtgaagggtgtgtgtacacagctctgcctcgggcctggccagtcctgccttccccagtcccagctctggatcctggacatacctgctctttaggcctagcagaggccaagtacacacacacacacacacacacacacacacacacgcacacgaagagggcatgcccaagaatcagacatgtgcaaaaacctagcacatgccacaccatccggcaaacacaagcaaacacctacatatctgccctgaggtgcagagatgcagaatccatccatgtccagcaacacacacgctcaccattccccacaggcatcctcacatgtgaatacgagtgtgtgcacagtcacacgccggcacaaatccttctgcttgtactcacgctcaaaatgcaccagagcacacatgcaaaatatacacattacacacacctctcactcaggcactcaggccatgtgcacacaaatacacattcgcacacggacacacacacgactgcctaaaggtggggcttttctctcatcttgctaatctgcaagtgggaagttcatggctggagggctgacaggcgactcttcaggcacctccgtgggtgctggggtgaccatgatccataggtcaccagggcctctggagaatgacaagaggtgctctcccctgtccactccaaggtgggaccctggaaagccccagccagggcagggcacaggcccctccatccctgcagcgcatccgaggaacaggcgttttccccatctcaggggcacagagcggattgagagggctgagaggagggaaggcccggcctcaccagacgacctcgccaacattggaggagatgaggtagcggatgaattgcttcatgttgctgtagatggcccggccctcctccaccgcagccacgatggaggcaaagttgtcatctgacagcaccatctctgccgccgacttggccacggccgtgcctgagcccatggcgatgccgatctctgctttcttcagggctggtgcgtcgttcactccatcgccagtctgtgggccaggtcaggtagggctgtgcctgagaaacttcccttccacctccccatctcttctcaactcagcccacccccaatcttaggggatgttccaaaggaagcagacagttagacagaacaaatggtgggttcaagaatgaactagaaattgggcagaggatgaggctgaggagaaggcaagggatgcagacaaggacaaagttggggagaatatcaagcatgaggttagggaagatgatgaggtggggatggggatgacggtgagtcagcgatgagggtagggatgaaattgaggttggatgtggggtagaagatgaaactgaggttagggagaaagctgaggtcaagtcaggaatgaagtcaaggggatggcccgggtaaagagccaggtaggtgttgtagtcaagttgaagatcaaggcaaaggcagaggccaagtcaaggtccacatgaggagtgaagtcaagtgacatgaagtctggagttgcaatcaaggtcaaactgaaggccaggccaggagcggtggctcacgcctgtaatcccagcactttgggaggccgaggtgggtggatgacctgaggtcaggagttcaagaccagcctgggcaacatgatgaaaccccatctctactgaaaatacaaaaattagctgggcgcagtggcgcgtgcctatgatctcagctacatgggaggctgaggcaggggagtcgcttgagcccgggaggcggaggttgcagtgagccgagactgcactgctgcactccagcctgggcaacagagtgagactccatctaaaaaaattgaaggccagatcaaagttgaggtcaacataaagcattacattgggggtggggcagtgtcaaggtcaacgttgagaataaggtcttggtccaggtcaagactggaattctttttttttggtgggggacagagtctcactctatcgcccaggctggagtgcaatggcacaatctcggctcactgcaacctcctcctcccaggttcaagcaattctcgtgcctcagcctcccaagtagctgagattataggcatgcaccagctaatttttgtatttttagtggagacagggtttcaccatgttgactaggctggtctcaaactcctgacctcaggtgatctgcccgcctcaacctccgaaagtgctgggattacaggcgtgagccaccgtgcccggccaagactggaattcatatcagggttaagctcaacgtaaatagttatgtcgggctgggtgtggtggcccacacttgtaatcctagcactttaggaggccaaggcaggaggattgcttgatccaggagttcaagactagcctgggcaacatagggagacctcatctctacaaaaaattaaaaaattagccaggcatggtggtgcatgcctgtagtcccagctcctcaggaggctgaggtgggaggatctcttgagcccgagaggatgaggcttcagtgagccatgactgtgccactgcattccagcctgggcaacagagtgagacctcatcacacaaacaaaaaaagaattagattaagatgagggtcaacatcaaggtcagggacaaagtcagcacagaggtcaaagataagatcaagaaccaggctgcagtgatagtcaagcttggtgtgcagatcaaggctgggccatgggtcagggttaaggactgggttaggctggaggtcaagattaaaaacagagaccaggtcaggggagaggctgaggtcagaagaataggtcagcaattaagaacaaaaactaggcccaaactaaatgtccatccaaagaggaatggttcaataaactgaaatattcacacagtggaatgctactcaacaataaaaaagcaataggccgggcgcggtggctcatacttgtaatcccagcactttgggaggctgaggcgggcggatcacaaggtcaagagattgagaccatcctggccaatgtggtgaaaccccgtctctactaaaaataaaaaaattagctgggcatggtggtgcgcgcctgtggtcccagctactcaggaggctgaggcaggagaatcgcttgaacctgggaggcggaggttgcagtgagccgagatcgtgccactgcgctccagccctgggtgacagagcgagactctgtctaaaaaaaaaaaaaaaaaaaaaaaaaagcaataatctgatacgacaaggcagatagatctcaaaaaagccccaaaccaaaacagtccatactgtatgattccattcatttgaaaatctagggcagataaaactcatatacggtgaaaaaaaaaaccgaaaacagtgatcgcctgttttgcgacgaaggacagagatggggaaggcgtgtgacggaacttcatgggttgatggtaatgtgtcatatctttttttttttgttttttgttttttttttttttggagagatggggtctcaaactcctgggctcaagcaatcctcctgccttggcctcccaaagtgctggaattacaagcgtgagccaccatgcctggcattttcctatcttgataaggctgtgagttacacaggtgtgtgcatgttcctaaactcatcagatagtacgccaaagatctgtgtgcttcatcgaaggcaaattttgcctcaaaaaggaaaaacagaaccacaaacaacattgctctctggttaacatgtattctaaagtaggtgagggggaagtatgccgatgtctgcaactgactttgaaatacacctaagaaaagatgggctagggatgggcaaagaatggctgcatggacaggtatgtgataaagcaaatacaataaaatgttagttgtagaatccagatgatagacatgtaggtgttcagaataaaattagtattgttattattattattttgagacgaagtctcactctgtcacccaggctggagtgcagtggcgtgatctcggctcactgcaacctctgcctcccggattcaagtgattctcctgcctcagcctcctgagtagctggggttacaggaatgcaccaccacgccccgctaatttttgtacttttagtagagacggggtttcctcatattggctaggcttgtctcgaactcctgacctcaactgatccgcccgcctcagcctcccaaagtgctgagatgacaggtgtgagccaccgcgcctggcccagaataacattatttaaatttctttttgtatttgaattttttggtaataagatgttagaaaaggtaagaatgaggcagaggggagagttgcacggcttgctcttttcacaccccgtggccccactcatcaccccctcctggggctccaggctgtggcctcaccatagcagtgatctcgttaaaggactgcaggttctccacgatgcgggacttgtgtgcgggctccacgcgggcgaagcagcgggcggtgcggcaggcctggcgctgctgctcggggctgaggtcatcaaactcgcggcccgtgtaggccttgcccgccacgtcttccgtgtccccaaagatgccaagcctgcggcagatggccacggcagtgcctttgttatcccccgtgatcatgaccacgcggatgcccgcctggtagcagcgtgtgatgcaggcagccacctcaggtcgcggcgggtccagcatgcctacgcagcccacgaaggtcaggtccgtctgtagggagggggcagattcaagcggggcctgagcccatccctgacctaccacctgctcagctgctgcagggagacttggctcctgcacccacctcgtactgcagggagaatcggctcctgcacccacctcgtactgcacaaacttgctgcagtcgtccagctccatgtcctccttccttgggggcgcgtcccgggtggccagtgccaggcagcgcagcgtgtctgagcctgagccccaatcccggatctttgccaggatctgctccctggaggtgggggtcaggggtgctgtgcggctccccacgcggactgagctacagcgctcgatcacactctcaggagccccctgcgaggtggggagagggagaagaggtaactcatcagtcagaacccctcctctccttcctgcccaaactcaggaaactgagactaagatacgggcaaaggccacccaagggtacacacgcaaggcagggagcagaatccattcactgaaagttcagaatgagaaccaagtgggtccccctgtgagacaatctaaagagaatggggggagtgtgctggggtgggggcagccaccaacctagcgatgcccttcccccaccagcccacagcagactcgggcactgcagcgttttgcaggcaggggtgagaatggcatcccctgcaggccctgcttccctggtgctactcgggttccaatttggtaggggcctcagcagcagggaggcaggctgagccctgcctggggaccagaaatagagccatacacagggtatggcgggcatagccctgggaagggggtccagggatgacaggcccctcagtggcctcaggtctcacctcagacctcaccccgggcctaggaacagcctctaaagctccttcagtggcttctcctgctcctaaaaggtcacccaggcactgacttttccaagtggcccgagctcccagtacagaagccttttcatttcaaaaggggtttaaacttcccttgcagggtgaagctagagctgtatttctctcttcggttttgggagcagcaacggagacgctgtagacagtggtctgcaagggagtcgattcctttccctccctgggactcagtttccaaaacacagagcaccaagggtggcaccaaccacccctacaccaccggttagaggcaaaaggggctcctgagaacttgtaacccaaccctgccattcacacgggaggactggggctcacagaggagcgtggatgaccaggttccccagggcgcgcaggggcccaggccagccaggcaggcccccaccttcacaaacatcttgctgccctggccagtagggtgagggcgggtgggcgtgcagtacacggacatggatttccggtctcgggagaactccagggtgaactccttccgcatcagctgcttgatgacctgcggggtccaggcaggtcagggcatgaaggacagagccagcaactctcgcctgccttcccaccaactgcttggccccaagagagcctcttgctctgtgtgggatgacatctacactcctctgaccccaccattcaaggcctccatttccctctccagccccagaaatggcaatacgatgccgtttgctgaccatgctgtgtgcagcccaactccaaacctttgcccacacgcagccttctcccctcttttctccaagtcttacttcaccgtcagccaggagcggtggctcacgcctgtaatcccagcactctgggaggccaaggcaggcagattacctgaggtcaggagtttcagactagcccggacaacatggtgaaaccctgtctctactaaaaaatgcaaaaattagccgggtgtggtggcacgcgccgggaggtcgaggcacgagaatcacttgaacccgggaggcagaggttgcagtgagccaggattgcaccattgtactaaagcctgggcgacagaatgagactccgtctcaaaaaaaaaaaaaaacaaaacgaaacaaaacaaaaacttcagtgtcctgtctgccttctccagatgtcccagaagccccagccatgcagccggaggcctgagcccccagccctgctcaccgtgttacaggcgccagctcgctccacccgggacagagcctgcaggtcggtgtcgaacacgttcatcttctccaccaggcaagtcagagctgtctccgtggcctctcccaccttctcatacacacccttggcctggcaaggacccaggggatagggagtgaggggcaggcagcctccagcccgcatccccagcctcactcactccttgcccctgcagctgcctttgctggagttccgtgtaacctcctttgcaccggcccgtgagcccttcccagcctggccgccctggggtcggggtggtgtctgacactgacattcagccccccacactggcattgatcgccacacaccgtccctgccctccgcctgcatctctgtccacttcctgtcagcctccttcaccggtttctgctgtctgggcccgcttccaccctcccacctgctctccctggggccctttgctgagccccaagcccagatgtccagctgcctgctgaaccttgttccccggggacccctcaggccacctctcccactctctgtatttgccactccggcgacagccccagacagcacaagaaccaggagcccccctggcttcctccctgtctctttcacctaaccagtcaccaagtcccaggatttttggctcctaaatgtctctgacccataccttctcccctctccccaaggctccagccagggctcagcccgcatctctctggcctgaatgaccacataggcctccctggcttcggtcctctactgtctgtctggcctccacacggaagcctcagtgatcttctgtaaatgcacatctgactatgtcactctcctgctcaaaactcttcgttggtgctctactgccctcagcttggcctcggactgggtctggccaaggacctccctttgggcagacgcctgctgcatgccccattccactgccccggccacgtgaatgcctaagtcgcaggaggctttaactgaacgtgggccttttgtgggctgtgtcttctgctttcaacattttcttggtcctgttccccaaatctcttccccccacaggtttccccagcccttcagccccttccatggcagtcccccacagaccaagagccccagggggagggttctgaagcctgtctgcggaaagggaggggcggcagagaggggtgtgcaggggtaaccgtgctccctgggtgtggcacttccagggagcaagggctgccaaccctgggagctttgaggctgggaaaagggtctgtcctggtcgcctggatactagggaggtcatgaaagggggtgaggcccacctcgttgtagtccagagccgagtcgttgcacagggcgcagatggtcgccagctccaccagcccgtcgaactggccgcagcgcacaggctgatccccctgccgcctgcggagccggggcggtcaccaggaggacctcggctccgcccccgagaggggtccgcctcttggccccgcccctaggagggggctccgcctcttggccccgcccccagaagggctccgcctcctggccccgccccgggagaggctccgcctcctggcccgcccccaggggcctcccacggccacctcggcgccgccacgcgtggccccgcccccaggccgcccgcccgcgcgtcccctggccccgcactcacacttcgccctcgggggtatacgtggtacccgagatggtgaactcgtgcaaaaggcaggagcccgcatcggcctcggctaccacgaacatctggggagcgcaggggcgtgcttaggcgggcggggtcgcctccctcctccccgggcggccagtcgaccccagggtggggtcctgcaggccccctgcccgaccgagggccaaaccggcctggccgtccgtgcccaccaggagggaaatagaacgcagggtccaggctgaggcagggaccgtctgctctgccagatgtgtccggctccggtttgtcccaatgtcctggacttctgagggatttatggcagattcttcagtgctctgggggcagttgccagcttgagggagccctgagctaggcagaaagcctgggtccttgcccatctcactgtgcgatccctggccaagtagctgagcctcagtttctccactagtaacatgggaaccgccccctcctttgccttcaaggaaatgagttcctggccttcaagggaggaaacccacacgcctctctggggcacagacccctctagcccagagatgtccccagagagtgagcccctgccacagggcctgctgggtcactcagcccccacctgtgcacctcaggaacaggaggcttacctggcccagcatgcctatttctttgtctgttcagccagctctgctggggagacagttcttgcttcgtggacatggcctcaccgcacattctcaagcaaatggccagcccagcgcccagtagatgcataagtgtcccttccttcccgctctcctccctactcctgggggcagtcacccagcaagcacagcccagcatccagcacgtaaggcccctacaacttccccacactgcactttaaaactctttattattagctgggcccagtggctcacgcctgtaatcccagcactttgggaggccgaggcgggtggatcacgaggtcaagcttgattgagaccatcctggctaacatggtgaaaccccatctctactaaaactacaaaaactagctgggtgtggtggcacgcgcctgtagtcctagctactcgggtggctgaagcaagagaatcgcctgaacccagaaggcggaggttgcagccaagatcgtgccactgcactccagtctggcaacagagtgagactccatctcaaaaaaaaaaaaaaaaaaatttattagggccgggcacggtggctcagggctgaaatccctgcactttgggaggccaaggcgggtggatcacttgaggtcaggagttatagaccagcctggccaacatggtgaaaccccgtctctactaaaatacaaaaattagctgggtgtggtggtgcatgcctgtctgtagtcccagctacctgggaggctgaggcaggagaatcgcttgaacctgggaggcagaggttgcagtgagctcagatcatgccactgcacttcagcctagacaacaaacagaatgagactctgcctcaaaaaaaaaaatcgctattagtcaagaaacactctgtttaaataaaatcctatgagggcttttagcaggacagtaaagctcggtagcacccctcccctaaagcagcctttgatgggctcccagaaggccttagggtctcagaatacagagcctgggtttccaagcccagtgggcagatgtggaagcaggggtgacagagaggcactggggacctgggaagggtggggaacacatagccttcaccatctccccacccacccatctgctgggtcaggaggagccttctgccccatgggcctgctgaagtctcagccagaatcccttggccgtgtgggcagtgagcccaggatgtgggatgaagtgcagggaatgaataattcctgccctggcccttcccaggttaccggagctggcttatctggtgacaggtgtcgactgcacagagtcatgatggggcaggatggaacccggatccaggcccagcttggcccctatgccaaggctgaacttgagcctctcctatgtcctttacgtttacctagcagggctcacacagccaggcttccaatgaggagactgaggttaacagactgtcagcaacctggccagggccccacagtgacacacaggcctcagtgacatgtggctacccaggcatgatttgctatagtctccctgtcatcttgtgaaaacctggacctgctctgggccaagggacagcccacagattctctcctccatccctcactgaaaaggaggtgggggagagacccagagagggagcccagcctgctctgcaacgcacagcaacaccaagctggccgtcactcacccggcagacagacatctgattggtggtgagcgtgcccgtcttgtcggagcagatgactgaggtgcagcccagggtctccacggacggcaggcttcgcacgatggcgttcttgcgtgccatgcgccgcgtgcccagtgccaggcatgtagtgatgacagccgggaggccctcggggatggccgccaccgccagggccacggcgatcttgaagtagtagacagcgccacgcagccaggagccaccgtgggccgggtcggcgaagtggccgatgttgatgacccacacggccacgcagatcacagagatggcgtgggacagctgccgtccaaactcgtccagcttgcgctgcagcggcgtccgctcgggctcgactgccgccatctggctccggatcttgcccagctccgtgtgcaggccggtggccacggccacacccaccgctttgcccgatgtgatattggtgccctggccaggggagggacaaggaaaaagctgctcagcagccaaccaggggcccaggacccctgactccttcaggccggaataaggcacttatccttctacccggctttccttttctccatgttgctagtgcttccagactcctgtagctatgtatgcacggggtccctgctgccttcccatgagagtgtcagctctaggaaggcagggtttgggttcatcgccgtatccccagtgcctagcacggggccgggcacagaggaggcacgggggctgatattgatgatataatcaaccagcgcagcacaagcatcaaccccacaaaatgtgatttcgtaaacaatcactatagccacacaggagcatagctgactacgaacccaataaacagtccattaatatttactaaaaaatccagaaaacctgagcctcagctcatccatttccaaggctccagtaaaatccccaattcctagcataagggacagccagccttgtggcttggtgtcctcttctgtaaagtggtccaacacaggcccaagatagtttttctgaggaggctaagaacctggtgccccttcaaatgcatatgctgttggggctggcgagaaggcaggccccagcctctcttctgtcttaagcaacgtagctccagcccccaacatgcagggcccagccagacaccttcctccaaagcttctttttattattactttagaaaattgttttgtttaattttgaattttagtagaaacgaggtctcactatgttgctcaggctggtctcaaactcctgagctcaaatgatcctcctgctttggcctcccaaagtgctgggattataggcatgagctaccatgcccggcccctccaaagcttcttagtgacagctgctgatcctggagcaacagctctcagagcttccctccccaccccaaggcatcctgtccaaggcttctatgcagctaggtaggcccctctcaagaagagttctgggccaggtgcagtggctcacacctgtaatctcagaactttgggaggccaaggcgggcagatcacctgaggtcaggagtttgggaccagcctggccaacatggtgaaaccccgtctctagtaaaatacaaaaattagctgggcacggtggtgtgtgcttgtaatcccacctgcttgggaggctgaggcaggagaatcgcttgaactcgggaggcggaagttgcagtgagctgagattgtgccactgcactccagcatgggtgacagagtgagactctgtctcaaaaaaaaaaaaaaaaaaaaaaaaaaggagttctgggtgagtttcactttcttcatccctcttcccttccaggaagttttctatcccccgataacttggtggcctgggccattgtctgactggcctgacccttccttgtgcccctaaacgctccttgctggcctcaggctactgcggggcagctgtgagtatcacttgctagctttctctgaggccacagaggcaggtctctcccgccaaagctgaacccatcactatccctgagaagagccaggtagaccgggcatcatgccttgtgggtcagttttcctgtcggagaatggagtatcccccaccatcctccaccattttggcagacctccttcctctagagcatttctatcgagtgattatagggaggctctgcccttctccaggggaaggcagggtctcccagcagaaatccaggatgtctgagttcgtcccagctgtgccactcattggctgtgtgaccttgggaaacttacttaatctctctgtgcttgtttctttccttgctggaaaatatagataacaagcataacaagagtacttatttcaaagatttggtgttaaggattaaataaactagtatgtgtaaagagcttagaacagtgccaggcacacagtccccagtaaacacaagctattattattactataaatttgcatgtattgtcaagaatcgatgaggttcttccccgtaggactttagctgattaaccttaatgttgggccaggtgcagtggctcatgcttataatcctagcactttgggaggccaaggtgggcggatcacttgaggtcaggagttcgagaccagcctggtgaacgtggtgaaaccttgttgctactaaaaatacaaaaattagccgggtgtggtggcaggtgcctgtagtcccagctacttgggaagctgaggcacaagagtagcttgaacctggggggcgggggttgcagtgacccgagatcgtaccactgcactccagcatgggcaacagggccagaaaaaaaaatattttttttttttttttgagacagagttttgctctcgtcacccaggctggagtgcagtggcacaatcttggctcactgcaacctccgcctcccgggctcaagtgactctcctgcctcagcctcccaagttgctgggattacaggcacacgccaccacccccagctaatctttttgtatttttagtagagacggggtttcaccatgttggccaggctggtctcgaactcctgacctcaggtgatccacccacctcagcctcccaaagtgctgggattacaggcgtgatcataatcctaatgttgttatttttatcattgtctgggcaaaggccccagacatttgacttacagaaaacagcatgttcttcttgtcctggttcacagctctggggtctgggatggcctctgtgtgcttggtcacggacacagattcacctggtcagggaatcagagatgagaagccccacatgaagacacgcccatcccttagtcctggcccactaggtcccggcctcctggggggggcctcacccgtcaggatggactggtccactcgcagcgtggtggacttgatctcgatgaggcggaggtcagcaggcactttgtcccccactgtgcggggagaatggcttggctgagggtggctttgggcaccaccagctgggaaaagccagaagggttcccagaacccaaggctggggctgggcgtcgggtgcctgagctgtgatcgctctggtgacccctgcccctctggcccacagtctcatctgtccaacagggttttggccaaagggctttggagggatccgacagccaccccctctgtatatacggccggaatgacggaggcacagagagggatggggctcccaggcccacataataaaaggaggaggcccctacagaagcctgagacaggaggattgcttgaacccgggaggcaggaggttgcagtgagccgagattgcgccactgcactccagtctgggcaacagagcacgactccatctcaaaaaataaataaataaataaataaaataaataaataaataaaataaaataaaataaaaggaggaggccccggcatacctgccacttctacaatgtcccctgggacgatgtcccgggcacggatcctctgcacgcccttgcggtccgagcggatcaccttgcccatctcaggctcatactccttcagggcctcgatggcactctcggcgttgcgttcctgcagaatagaaggccggcaggcagtctgtccctgctgccccccgcagaccacccccttggagtgactcctctggggcctgggatggaggtggaagcaggagagtctgcaggacgccagcaccaggtggagggcactcctagtggctgggagaccgccccccgcccggtcccacccccagtgcctcccacctgccacacgcccacaatggcgttggccacgaggatcagcatgatgaccaggggctccacgaaggcggtcgtggtctcctcgccctcctcgaaccaggccaggacctgcaggatcacagctggtgagctcaggccctgctgcgggccgagatctgctctccttttccttggcaccccggatctcctgcttgcttccctgctttggggagatagcactggggagctcttggcttggagagggccactcctccgagaaggccttggcacagggtgcccaccccacaggagtgaccaccccacccaggccaaccttcaaggctgtggggcagttggatggctgcccaccgaggccttactgtctgcctggagcagagcatctcagtgtggtccccagaccagcagcagcagcagctgggaacttgtaagaaatgttgatcttggggtccctcccagacctcctgagtcgtaaattctggggtggggcccagtcacctgtgtgtcggcaagcctacggattcttttgagacagagtcttgctctgtcgcccaggctggagtgcggtggctggatcttggctcactgcaacctttgcctcccaggttcaagcaattctcatgcctcagcctcccgggtagatgggattacaggcgtgcaccaccacgcctggctaatttttcgtattttagtagagacggggttttaccacgttgcccaggctgaactcctgagctcacccgcctcggcctgccaaagtgctaggattacaggcatgcgccactgcgcccagccaagcccaggtgattctgatgcacgcatccaaagcccattagccaggggagcatcagtgggaatggaggaacagcaaggagatgcggcagccaagaggaggctgcaagaggttcagaccccaaaatccatgtgggggacactgggatccacggaaggggctccggcagcagcactcagccagggacaaggtgccccccaggggcatttggcaatgtccgaagacatttttaatttttttgagacagggtcttgctttgttgcccaggctggaatgcagtggtgtgatcacggctcactgcagctccatcctcctgggcccaagcaattctcctgcctcagcctccagagtggctgggactataggcctgcaccaccgcactcggctaatgtttttgtattttttgtagagacagggtctccctatgttgcccatgctggtctcaaactcctgggctcaagcgattttattgccttggcctcccacagtgctgggatttcaatcatgagctgtcaggcccagctgtctaaagacatttttgatggtcatccccgggaggtgctactggcatcttgtgggtagagtccaggtatgctgctgaacatcctacagtggaaagcccccacccccaccccgacaaagaatgatctggtctaaactatcagtagtgctgaggcagagaaaccctagggtacagcagggcggggcggggggcagatgtgagttggggagctcgctgagagccagaggataagatggattggaggggtcaggtgggagccggggacccaatgtaggggccatgagggttcaggcaagggaagctgaagtctgagcagggcagggccagggaaggccagggcgcaggcccagggtgtggaggacaggcccaggctccaggacctcggagcactgcccagcctggctctccctccagggctaccgactaccacaggatggctggcagggccctacttacaaaggagacaagggcagccagcagcaggatgcgcaccaggaggtcctcaaactgttccagcaccagctcccacagggacttccctgggaacgggggtcatgtgtgaggctgggcccccaccactgaccctgcccactcagagctgggatggcccgggagacctcccggcccattccctccctgcactcagaagagggagaacccaggtcgctgagaggctcaggtgggtgatcctggggagctcagcaaggcctcactcagcggggagaaggaagtcatgaccagacagagaacgacccagggatgctgcccgcggcctagaggtccatcccggtgccagcctcaccttcctcactcgggagctctgcaggatccaggcagccacgggagccatgaggagacaagagaggagtgggtcacgcaggggcctcgggggagtctggcagtgcctccccaccgtgcccgcccagacccccaccacggactggatgtatccccagggctctctgaggccacaggataaatggtttgagcccaaatgcttccacccctctaccctcccccgactcagattgaggaagatctagggtgacttggctcatcgtgggatgagtacggagccaagagggtccttccagcccctccagtccagcccctccctgccccacttcacagaagggaaactgaggcctagaaaacagacacttcccccacccaggtcacacggagagtgggctgttctcacggctccctgcatagcccttccttagatggccgcagagtcctgttgagtctctgccacccccacagcaaggcagcccctccctcaaatggagaacaccagctcaggcgccttccgctcaccctgcctctaacatccctgctcccctgggaccagctggacaaggtctgcagctgggccggcctgctgggccccaccgcacagcagggctcccctggacaggaccccagcagccagcaccccgcagtgaggatccctcccatggtgcagtcccccccaggccctgcactccatcgagctcagtgaagaccccccagccccgccccacatacccagtcgccccccacacaacatggtgaagaacactgtttccaaactctaacagcacccacctcaattgaggtgctgatttttttttttttttttttaagagagtctcgctctgtcgcccaggccagagtgcagtggcgcaatcttggctcactgcaacctccacctcccgggttcaagcgattctcctgccttagcctcctgagtagctgggattacaggcacgcggcaccacgcccggctgatttttgtatttttagtagaaatggggtttcactatgttggccagggtggtctcgaactcctgaccttgtgatctgcccgcctcggcctcccaaagtgctgggattacaggcgtgagccaccgcccaggcctaggtgctgatttttatctccaacatttcccgaagcaccttttgtatcaggcagaggtgcctcgggcccctgaagtggttgaatcattcctacagcctaaagggcaggcaggtggcagggagttcctgccctgcttcacagacccgggcacggaggatcagggtggcggtgtggcttgggcaaggccacacagtgagtgagtgggtctgtgtggggatgagaggggcgggagccaggctctgcagggtgggcttggagaagctcccccttcccaggccgcagtctaactgagccctgcctcctcttgtctcttgccactcaaaggacagtctccggacatctgtggcatctccccgaagctcgttagccatgcggaatctgaggccccggccatggctggctctcttccacctccttcttcctgacactggaaacaggtccttgcattggtccacctgtttttggcctacaggcatttttttttcctacgggagccctctccccggaccacctgtttggaagctttggggtctgcacctggcagctgaaccctggggagtatcaagcagcccactggactgtaggaatccaggagggaaatatatagcctaaaaatacactttctagcattttctccaaagtcctattttcggcagtggctgacattttccgtggaaaatgtaatctccagtgtcctgcgtcgagattaaaatcaaacagactttttccttctgatctatttagctgaggcgaacaggaaaggcggggggagggccaggactggtttctgggccaattctccaatggagcagtgtgctttcgaggtcaccccagccatgccccagcctcgaatcaggacagcactaacctcatggtgcgcatgggtgggcttgtgctgggctcttcccgggggatgcctgtaaccctcacctttctttattctgggcaggggcgaggcctggggttgggaagcgtgtcatggggtacacgtgccagctccagtcctggacttccccacaaaggtccccatgatgcctcctgcctgccccggctggtctctcaagttctcctttctcttattttattttattttattttttttttttgagatggagtcttgctctctcgcccaggctggagcgcagtggcgggatcttggcttactgcaacctccgcctcccaggttcaagcgattctcctgcctcagcctcccgggtagctggaattaccggtgcctgccaccacgcccagctaatttttgtattttcagtagaggcggggtttcaccatgttggccaggctggtctcgaactcctgacctcaggtgatccacccacttcggcctcccaaagtgctgggattagaagtgtgagccaccgcgcccggctcagttcacctttctctacctgtctacctggatcatctccccttctgctctctgacccaccctgacccaggatccagtctttggtgctcattatgttgttccccaaatatttctggttctcccccaccttgtgggcacatagtaggagggcacttcccggcccccgtgtgagttttgagaagaaggatgtgtattcgtgccaggttggagcattgacttttggtgggggactttctaggaggtcactgtccagtagaatgttctgtgagagcagaagtatcctccgtctgtgctggccaggaccgcagccactagccacatgcagctggcgagcccctggactgtgactaatttcgaattttactttaattttcatgcatttaaatgtaaatagccaagcggctggagctctttgacactctctcctacagcagccagcagcctgtgagatggtgtctgctccatcgacctgggtcacagaatgaggaaggcacagagcacccggggaccagcctgctgccagcactcagcaggagtgagaaatgagcctctggtcctttaaggtgccaagagagatttggaggcgattgctgcagtatccaagctgaacctgactgataccccctccgctgtgacctggcttcctccgcaaagctcccctctcaccccgcccacctggggaggcctgacctgccgctgagcacagctctggtcctgcccacacagccagctccttgtggggccttgagcctcatttgggaggtggggtacccacacccactttgaaggcctgctgtggtgatcatcatcatcattactgttaagagtcacatttaccaagcacctgccaagcaatgtaccaggtgccttaccgcattatcaccagagaacaaatgggaagacgctggggaccgagcacgtgaggtgcttagcggaggtcatagcagcagcagctggtggtgtgcgccagacaccctgctaactccttgcgtgccttattctcatgatccgcaaacaagctgggaaggaggatgccattgttatgcccattttacagagtacacaacagagaggttgagtgactagttcaccgtcacacagcgggggagacagggaagggttttgagctcaggcagtctggttctcgaccccctgctgtgggcctccgatgctaactcttaggctgtcctgccttccctcctccactctctttaccgctcacccaagctcatctgaaaacccttggtgtcccatgtcctgaccgttgggctggatgtccccatcccttcagtcggcgtgcccctctgtagagagcccacagcccaaatcctcctgtccaaaaggccctgctggcctcactgatggtgctttaggggtttacgaggctctgcctgctcaggcctgatctgcttctaaatgcaaccctgaaggacccaattctcccctcgcatgaatgagccccagggtgatggagggagcccagggctgggagatcccctaccccaggcattcctggaagatgctgcctccttccttgctctctcccaggctgcgtgttggaggctgagatagttccccttgaaatggcggccttgggcctctggcagtgccagatgtcctatctgttaaatgagagagtgccctggctctgcccactctcagtgccatccgctgggctgcagggggcagagacaggaccaggaggtgccgctctctctgagagccacagtggggctggccactattctaatctgagcctccgccacggtgacccctgcctggctcatgttgccagactgagagggcctgtgttcacggaggcccagcgtgcaggcctgggagtcagcctgcagtcctgggaaaagagggaggtgatcagagaagcttcgtggcttagagcaaggaatctggtccagagggctcaagttcaaatcctgctctatctcacggtacttctgtggccacaggccagttacctaatcccctgtgtctgtttctccatctgcaaaaagagggtgataaatgtaagtacctcacagggatgccggaagattgaacggcatgcataaagcacttggaatgcgtagcacacagtgaacacgctccagccagaatcacttgctagaatataagctctagggcagcaggacttcgttaagcgcagcgtctccagcacccagagcagctcctggagcatagcaggtgctcagtaaacatatgtgatggatgactgaccctgcctctgtcctgttcacagagcttcagtggctgtccttggcctacagaataaagaccaactttagcacgggcttcagggccttcctggatctgtccccacctgcccttctaggatcatgtctgtatcccgaatgcacatctgtccctctgttagccaagcctcaggattgccacccctgctttttagtgtatttgtaattgacaaatcataattgtacacaattatggggtccagcgtgatgtgttgataatcccgttttgcaaaaccttctcctcctcattcatatatatatatatatacacatatatatacacatatatatagacacacatatatatacacacacatatatatacacacacatatatatacacatatatatacacacatatatatatacacacatatatatacacacacacatatataaatatatatatatatatatatacacacacacacacacacatatatatatattgttttttttcagatggagtctcattctgttgcccaggctggagtgcggtggtgcaatcttggttcactgcaacctctgcctcctgggttcaagcgattctcctgcctcagcctcccaaatagctgggattacaggcgcctgccaccatgcctggctaattttttatttttattttttagtaaagatgaggtttcaccatgttggccaggctggtttcgaactcctgatctcaagtgatccacccacctcggcctcccaaggtgctgagatgccaaggtgctagccaccgcgcccggccttcctcctccaacattttgcttgtgccattccttctgtgcacagcagcatcctatctcctcatataaaccccctttccaggaagccttctctgaaagcccctcccctacctcatcgctgtgcccttctctgaccagttgtcagtattagggtccccccaccacactggaacacttccagggtggggcggggctgagtcatccctgtgtttatgctgagtccttacagtcattgtttactcagttgctccgtggtgcaggccagggccctgagcccacagtccagagccagggagaaggggggtaagcgatgcccctgggctgcccccaggctccacaccacctgctcccctcatcccccctctactccttccttcattggaaactggtatttcagcttctaaatgtcagttccagccgggagaggcaagcactcacccaggtcttcctcaaaggtaaatttacagagcaattaaatcgtcacttgcagagtcaggaagaggccctggctgggcaagacccgcccagcccacctggccctgcctgtgtctccggggtccacctagagtggacacctgaccttgctctgcgggagccactgcggggccttggaagtagctctccgctctgcagcggggcctgcagcacccctggcttatccggagctggagatgaagggtttgctcaacatctcttcgtccgactgtgctatgggaaaatacaggccctgccttagggtgtaagagggtgagggggcccagctgggcaggcctgatgctgctcctggggggcttcagctgcccagcaggggccagtgggagtgaaaactagggtgaagcatgaaagacgttgagcttccaaagggctgtgggcaaaccacaccctctcagatcccgcaaggcccttaggggatcccagggtcccatccctgctatcctgaggagcagcaggtccagggagggccaagtctgcccaatgccacccagcaagcagggccactcagatggccccctcttcctgacacactccgttcctcttggcctggtttccgtgggctacgcatatgggttgcccgagtttcagcaccagctatggcctggaacttatttgagggcagcaaataaggccagagccaagacgccgctggcaggagtctaaatctggaccactcatcccacctggcagccctggggccaaggcgctcactgcacatgggccgcgtgtggcccgggaaggcaggcttctgcccggcctgccagctcccttgaacagagaccaccccagaagacctcctgggatctgcccgactctcaggtcactggggtctccagggactttagctacagaaaggacatgcccaacacagccaggtctcttgccttggctccagtccagcagaggagatgggcagcccatttggtggctccttaacatatgaaaagacacccaatgtgactttaaacagaaagatgccaagcaaacctacgagaggactcttccacctgactggcacagatcagaccgtctgatcccaccctgtgctggcgaggcagcagagaaccagccgttcagtcggcacaactgcacagagaagtttagtgacagctgacgacactgaaaatatacacccacttagaccccacagttccacccccaggaatgcgtccttcagtgatattcacaagcgcgtgacatgatgtggcaacaaggatactctgcaatactgcgtgtcatagcagaggctgccaacaacacaagcgtccaccagaagtcagagaaaagccgcacgccgaaatgccatgcagccactaggaagccccaccgtgctcctcctggcaccggctccaagaatgactgtcaaggtcaaagcagggacaaagagcacttatcctcctcctgcttccgtgtgggaaaagatcacaagatcacagctccagatgtgtatatgcacggactgtcttgggaagaagacacaagatattgggaggactgggaatgggtggctggggacggggcggagaatttactgtataccttttgaaccccttgaatgttgcactgtgcacatttttattcaaaaataaaaaagatgtacaagtaaaagccccccaaggaagctgaactctgggtacctctggcacctgcaaaggtgggctcacaggaggtgctggggccaggagcctccccactcactccctgttgggggttacggcagatggggttttatgtgtgagtggagggggtccctggctagcgtgctcactgactgcgctgccgaggctccccagctctgaagtgtctgtgtgcagtgagggaggagggtgggaaggtgggggtgggatgcccagccgctgcctccctcccctggcagaatttgcaagcttcaggacttaagcaaatgacttccttgtggtttccaacaataacgaccttgcaggtgcacagactcctggggtggggagaacacatgtctctggggtgtcccttctgccctcaggcctgacccaccctgccacccagcttgtggccaggagcccgccccagcctcttctgcgacaaggaaggatgacttggtgtctgtgacctcactaaagactcacaaacaaccctgggagatgggttctatggcagcctcgcttatggtgaagaaaccgaggcacagagaggcaaagaggctggtccagcattgcacagctatgaaggggcagggctagggttcaaagcctcatcagctccaccccagcagctgtgctagggacatctgcacctcctcctcaagccatggcaagcctgaggcaggaaggaacagctggctcccctctgctcacctaaagacttctagagccctggaatgcccccagccccaatcagtgatctgagagaagagccctctagggacccaagaaggctggaggcaaagctgaaaaagctgctgccggctgacccaaactcctagcacagacgcccacaccagggttctgcatcctgcagaacttgtgactgtcttgtacagatggggaaactgaggcccagagaggagcaggtaaccagtgccagctccaccacctactatgtgacctcgggcaagtggtttaacctctgggtgcctccgtttcctgctgtataaaatggggatgacaacagtccttcccttatggagttgttttggggaagaaatgagataatagatgaaaaatgctgagactagaacctggcacatagtaagtgctcagtgaacatcagcttttattattaatactatcaatgcccagaggatccaggggagcccagcaatatccctccccaacttttcccatcacaccccaacacacatccaccctctgtggacctacacaccacgccaagcccacagccttccccatcagttcacacaggtgtgcgctggccagggcaccccaaggatctcatctaaccaaataacaggtggggaaggctggggctccctccctcccagtcagttcctcctccgctggaccaatgaagacatgatatcagaatgaagacagacctggctagggtcgtacagaagcagtatttgtgtgattccagggacaggccaagggctgcgtctccagtttccctcaggaatcaggattcccaagctggaggctatagcagcacaaaagaggcagtgggaccgcagacctgcctgcgccggccctcgcccccagcccaccccagggtcagaggcagcccatgctgcccagctctcctgcagcaaagcacaacctccctgccaagtcactaatgggggatattaaataatatttatctccccagttcctcccacagctcaactaaatatagcaactaatttttttgaaaaaggatttctgctccagaaagataatatttatataagaggtggttttcataaaccaatacaaaacccaaaagtccttttctgacacttcttcctaattttcaagctagccctgagtagtaggatcccagggctagaataccttcccctctggctggctgggaaccccaaaagggcaaggctccaagtccccaaaggatgcagacccaggctgccctctgtagatggtgagggtatttctcctgggatccctcacactctgcccgatgctgcgggcatgagcaagggggtggcaggtcctgcctggaagggatgtggggagggcacctctgtattttccaccctcatgggacctccaaggtgccaggccacatctggacagtacccggtggcactcaatgtgccttttggcaagagcaagaatcccacactcctttgaaggaggtgaggatgaaatgatagtgaagcctccctccctccccagagatgggaaaggcctccctggcagttccctgaggccttgactccgccaccccaggaaggtgggtctcccgcctcagcagttcaaagcccccaccgactccgccagccacatccgcttcgggttgcagaaagaggaagacctggggtgggggtgggggccccaaggctgctagctgataagcggcaccttcctgggcgttttctggagccctcaggggagaccctggggccagctgggaggccgagcctgagtctccggccgtccctcgcccgccggtgtctgcgctgcacctgcaggatgccagcgggagcggcgcggcgttggggtggaatacggtccaggatggggtggaataacgcttccagggtggacggggccggagtggaggtgggaagtccgggaggaccgcgcagagggtgccaggcgtccggtctccccagctggaacccgctcccagcccccagcccccagccccggcgccggcgaaggtggccgcgcagccccgccgggtgccccaggagcatccgaagaggtttccggagccctcgcttcctgcccgcccagagccgggtggggaggcaggaggggaaactgagactgcggcgcgcgcggcccccgctccccggcccggcccggcccgcgcgctcaccgttggggccgtagcgctcccgcgcgccggtcacctgcgccgggctcaggccgccctcggctgtcaccgagaagtggcgcagcacgtcggcggccgggagcagatgcgccgcctccatgccgcccgcccggccgtctgcgccgtccgcaccgtcgaggccgcctctccgccggggggctacaaagcggggcgcgggggactcgggcccgggcgggcgccgcgcgaggccatgtccgtgctgggaccttacccgacggcagtggcggcggcggccccggcccgcgccaggatgctgcgcccgggactccctccccggggcggggcggcgcggggcccgccccccatcacaccccttccggccgccctccgcgccccggggcgcaccgcctgggtcccccgcccattctgcagaggggaaactgagaccgcccgcggggcgcgtgctgggcctgtcgggagccgggggcgcgtggcccgggggtcctcggtcccggtccgcggagctgctaggggtgggatctggccgagagctggggcggtctgcggagcacccggctctgggctgcgcgtcgcctcctctgggctctcctgggcccggggcgtcctgcttcccagctcgaattctgcgaagtgactccagagggaacccgaaagcctctgaataagcgggtcttctctagaggaaagtgctggatgttctccttatttggtgtttctgctttctttattcttttccaatgcccaccggcgaggggttattcctcacataaccagaacctttaacaaagagccggtgcataagaaagttcagaaaaccaggctcgttaccctagactcacaccgtcaccccagcaggaaatgtaaccagggagcaaaggtggggctccccagaggggcccgagagggtggggtgggggggtctctgcccagggctcccaggggactgaccctggcccagggaggggagagatggatgagcctccgcctcagcgctcccgagctccacccgccccaggagggccaggagaagtggcagcgggtcagaggaggaagtcgcaggaaggcagaaaccactcgccccgccaaaaggaggagctaagagaacagcctgattgccgctccctccagcttgagagacccagacagcctcaccccagcccttatctgcctcccaccacgagctgggctctgccttctagagcctcagtctctgccatccaccaaggctgcacagggtcagagatgccaggattgagcccgcacagctggctgttcaaaccccaaaccccttctgtgcctctgcagccaggaagctttcccagatagctgcagctgcgccctgccccaacaacacagcccctcacccgctcctgagagcctcaacttccagcctggtctggagctgctgacccctatccagatcatgcacacccccagattctgtgctcttcctcctgggacaggactgggcccctcctcctctccgcctctcggtgcctccctgagcaaagacactccctgaggactggctggaccgaaaggtgctttggggcttttgatgggtgatccagatggattccctgatatcagctgcgtctcagcctggtgctgtggagctagaggaatgctggttttctggttgtggctcctccggcctggtattttatttattgattttattattattattattattattattattttccttttttttttttttaatttctttgagtcgtagtgtcactctgtcgcccaggcggagtgcagtggcgaggcgacatctcaactcactgcaacctccacctctcaggtccaagagattctcctgccttagcatcccgagtagctgggattacaggcgcccgccaccacatccagctattttttgtattttttttttttttttgtagagacagggtttcgccatgttggccaggctggtcttgaactcctgacctcaggtgatccacccacctcagcctcccaaagtgctggtattacaggcatgagccaccgtgcccagccccattattatttttttgagacaggatctggctctgtcatctaggctggagtgcagtggcatgatcgcggctcactgcaacctctgcctcccgggctcaggcgatcctcccacctcagcctcccaagtagctgggattataggcgtgagccaccacgcccaggtttttttttttttttttttttttttttttttttttttttttttgtagagacagggtttcccaatgttgctcaggctggtctgaaactcctggactcaagcgatcgacccacttcggcctcccaaaatgttgggattacaggtataagccactgcatcccgctcagcctgacattttatatctcaagtctgatatccccagatatttccaccctattcctttctcccccactgctatagtccacaaaatcccaactgtatccctaagttgccaggaaaaatgttagccaggacttgactggggacagagcctcacagctccccgctagagccctatttcccagagatcgggagccctaggcgttcaagccgctgggaaacccctgctccaccctacacacacatcttgaggtctgacttcttctctgctggccctagggaccttaaccccagcctctcccgctccaccgcaccctcagctgtgagttggtatttgctagaaggtagggccagaaggcctgactgtttgctctggcagccaggcctatgttccatttctccagcccaccccaccctaccttcaaaccgccatggcaggacaaacagttgccagcaaccggggccctcacctggcaggctcacacacctgtcagcatgcccgcctgctcggctgcccctgtcacaacttctgggtgcccccccagctcccacagaatcacatgcagtcatttcacactccagctgcctgccccgggctcacgtccctccccgccatgctctctttttgtacctggacagacacacagctggtggccagggcgacatggtcacaggcaggctgtccaaagggcaggtccacattctccacctcccagctgccaggaaccaagaactccatgcctggcacctagacacggcttttgccacctcctccaccagacagaaggtggcagaacataccacctatctagcagaagtatatctacccgcctcacctgagggggcccgggtgggcatgaggaaacagaggtcttccctggaattattatttatttatttattatttttattttttatttttttttgagactgagtcttgctctgtcgcccaggctggagtgcagtggcacaatcttggttcactgcaacctctgccttcggggttcaagtgattctcctgcctcagcctcccaagtagttgggattacaggcacctgccaccatgcccagctaatttttgtatttttagtagagacggggtttcaccatgttggccaggctggtctcactaatttttgtatttttagtacagatggggtttcaccgtgttggccaggcatggtgaagataaggcaacccacagttccttttattttcagtccttctctactcatccagctgcctcagcctcccaaagtgctgggattacaggtgtaagccaccacacccagcttttctggaaatattcagacacatggagaagagggtgctgcccgcagaaaacaacagcctgagttgaaggtgagaaatctcagccatatgtcagggatagtgatttgatcccttagtgtggctggatcgtaaggagcaggagtgcaaggaccaggagggcagattagagagacagggctaggacactgagaacctcgattgtctatgttatgtcctgggttttgtactgaagggttttaagcaatggagagatggggccaggtttgcctgctagaaaagtcccccatagaagctggtatggagaagagattaaaagggagagccatggctgaaaggaccatggagcggtagtcagggtcatgccccagcaccctgatttccttcaggcctccccaggggaggggcctctaagctgtgtagggaaatatctgtgattagagccactgacttgaacattcaccatatgctaagcttgtttcacaagttactcccatttaaccctcacagtaaccctggaggaggattttattatccccattcagagctggcttcatgggcatgcaacctgcgcaggtcaccagttgtcagaaggaccgtctgcttgatttttgttgtggctgtttttagagatgggggtctcgctatgttgcccaggctggattccaactcctggactcaagtgctcctcttgcctctgcctcctgagtggctgggaccatgggaacgcaccaccatgcccggcctcccacttggtttaatgctctccaaccgccatcttgaaattctttttttttttttttttttgagacagagtctcgctctgtcacccaggctggagtgcagtggccgtgatctcggctcactgcaagctccgcctcctgggttcaagcgattctcctccctcagcctcccgagtagctaggattacaggtgcccgccaccacaccgggctaatttttgtatttttagtagagacggggtttctccatgtcggtgagcctggtttcaaacccccaacctcaggtgatctgcccgcctcggcctcccaaagtgctgggattacaggagtgagccaccgtgcctggccctttgaaattcttaatatagtaattttctctttgaacttgtgctttgtaagtgaagcccgttgggaaaacggggcatgctgtgagccaaagaggcccgtttaatacgccatctctctcccgtaaagtgctcactgtgctcgtgagcacacaattctggtggactcatggtgggtgggagttgagtggactcgaatcaagtctagggtgaatgtgttatgtctgcgactgagtaagtggggtgctgacagccgagaggccctgctttccatttgaacccgaatttgcttcatgcagaaagaagacagtagtgttctgagaaacacgaaaggtcggggtccctatcatatcatttcttactcacattacttccctgcgttcaacaaccactcgcattcaacatgatgacacagaaggaaaggaaaagataaggcaacccacagttccttttcttttcagcccttctttactcatcagtaaagcaaaggcagagggtgttggaggagtgtattcatattgacaagtgaaatggaaacagccgagtccatgttgtacggcattttcctgttctggtcagaacaaaatgtatgtgcatgtacaagctacacgccaagacttggtcattttagtgattacacatatgagttaaatgctcttcattttgcatttaaaacgggcattgcacaaagtaaagataaatgaaaaaatttcatgcaaattattagaatttttatttcttcttttcttagaaaatgaatttgtaggctgggtgccgtgactctcgcctgtaatcccagaactttgggaggccaaggcaggtggatcacctcaggtcaggagttcgagaccagcctggccaacatggtgaaaccccgtctctaccaaaaatatacaaaattagcctggtgtggtggcgcatgcctgtagtcccagctactcgggaggctgaggcaggagaattgcgaattgcttgaacccgggaggtggaggtcgcaataagccgagatcatgccactgcactccagcctgggcgacaaagtgagactctgtctcaaaaaaaaagaaaaagaaaattaaagtgtagatttttcaaaagcaccatgacaagttgagcgagactgcacgagaaaggaaaagttttatattttagtgcctttaatgagactctttccccggtttttcattttattttattttttaaattcttttgagatggggtctcactctgttgcccagcaggaatgcagtggtgcaatcatggttcactgcaacttccaaatgctgggctcaagccatcctctcgcttcagcctccacagtagctgggcctgtaggtgcgcaccaccgtgcctggctaattattttttaaacttttttgtagaggcagggtctcactttgttgcctaggccagtctcaaactcgtgggctcccaggatcctcccacctcagcctctcaaagaaagtgctgggattacagacaggagccactgcacctggcccctctgttttttaaactaagggtcctcattttcattttgcactgggctccgcaaattatgtagccagtcctctttccattttacagataaaagcctgagaggctcacagagcctcggggacttgcccaggggcgttcagctgggattaaaacctgatctgactccaaagcacaggctcctaagcaatccccagcctgcttgtcggggtctgtcccaaaacactaggtcagtgcagctttcgctgggcagagaaggatgtcctacacgctccatccccttgagcctgcctttctgtcactgcctgaactcaggcccctcttctctctcaagctatacctttccaatagcccgcttcctggccttcctgtctccagacttacttctggtacagcaagattgcttcaccgagatggtgctttcatgacttcattcctctcctcaagaacctcccttagctccctagtactggcaggatcaagtctagactcttcagcccagcagagccctttagccacaggctcctagccaaggcaaacctgtctcttccagatccactggccttgcacatcctagcgtcacccgttggttcatgcagttcctctggcctagatcgctcttccggctcctctccctaaaatttggaaactcatttcattggcttctccaaccctgtgtattcactctcttccctgcacgcttggttgactctgaatgagacccctgtggaggcccccagagatgaaggcctaaatcctgcttgtacacaaggggaaactgaggcccagggaaaggaaaggactcaagcagggacatggagccagggaggctgaggcagagcttcggcgggaacccccggcccaggcatgtgctgctctttgtgagttgatggctttcctcaacacacaaatgagtctgggtcctctgggtcctttgactgctgggtcctctgctgggctaggaccaggacagtctcctcaaaagccagggactgaccttagggcagcctggcctcagggggtctaaccctgccctgaggaagggtcttgctccagaaaaatgaagagtttgagccactgttcaggagatagttccaggctggagtttgggagggctggggggcagcggggaggggcaggaggcctgggctctgcccccttgttatcctagcttaattcattcaaaaatatttcttggttgggagcggtagctcacgcctgtaatcccagcacttcgggaggccgaggcacgcggatcacctgaggtcaggagtttgaggccatcctggccaacatggcgaaaccccgtctctactaaaaatacaaaaattagtcgggcttggtggcgggcgcctgtaatctcagctacttgggaggctgaggcaggagaatcgctggaacctgggaggaggaggttgcagtgagccaagatcaccctattgcactctagcctgggtgacaagagcaaaactccatctcaaaaaaaaaaaaaaacaaaattatcagttgggtgtggtggcccgcacctgtaattccagcactttgggaggccaaggtgggaagatcgcttgaggccaggagtttcagaccacgctgggcaacataggagacccccatctctacaaaacaattttaaaaattagccgggtatggtagcctgtggtctcagctactcaggaggctgaggtgggaggactgcttgagcccaggaggtcaaggctgtgaaccatgattgtgccagtgcactccaccctgggtgacagagcaagaccccatctctaaaaaaaaaaagagaaaagaaaaaagaaaaatttcaaggacccagcatgccccaggcatggcaccatgttcttggagacatggtccttgttctccccatggccacacctgagaaagaagcaagccgttcatcccagaaaaccacacgcagcaacagatcgcagtgtggtcagagctgccttgagaacatgacaggcggtggagggcggatgtcacccagtcagggagatcgggaggctttctggaggaagggatacttctgaaatctgaaggcacaggggagggaacggtgtcgcaggctgagggaacagactctgcaagcttgacctggctgtgatgtcttggaggtgcctgcccgcctctgggcctgagccccctgaccgtcatgtcagtggtgaaggggaagtggcgggggcagcgtcttcccgcagagagaacagaaaacagtggcggggttgccctgctgctgccccactttggtttgtaaattggtttgagtcaaaatgcaaacagccttgcaggcttgggaacctcaccttcctcttcttcggggtcacctgggcctggtggacaggtgtcccaggtgttctaaagacctgctgctgagcagcgagtcacctgtttgttcgtcttatctgatgtcatctgagcatcgggtctgctgttttaagcccccaccccagctccctatttgacagccttccctcaggggaggggcaggggaggaccttggctcccagctgttcagggtgggcgacacccccctattatcttgcccggaccccaagttcttttgttgtcgtcttttgggcttcgggacccctgtgtgagtctctgatgcaccccatccatcctcctgggcctagacccccctggcctggagccacctcacacctggctcctccagcctctctctgtgctctatgatgggtcctcctaggagcctcgagactcccaccctcccacctcatcagctctgccctctcagccaccatccagccctcaagactttcccttcaggtgccgaccccaccctcaccacttcctgcctcccatgagacccacattgagccatatccagcccctgcacacagtaggggggccacactgagacacatccagctcctgcacacagtaggtagggggccacactgagccacatccagctcctgcacacagtagggggtccacactgacacacatccagccccagcacacagtagggggtccacactgagacatatccagccccagcacacagtaggtagggggccacactgagccacatccagctcctgcacacagtagggggtccacactgagacacatccagctcctgcacacagtaggtagggggccacactgagccacatccagctcctgcacacagtagggggtccacactgacacacatccagcccctgcaccagtagggggtccacagtgagacacatcccgctcttgcacatagtaggtagggggcacactgagacacatccagcccctgcacacagtaggggccacactgagacacatccagaccctgcacacagtaggggccacactgagacacatccagaccctgcacacagtagcggccacgctgagccacatccagcccctgcacacagtagtgggggccacactgagccacattcagctcctgcacacagtaggaagtttctagctctgggtctttgcccatgcccttctgtctgctcgtaacacctatctctcagctggctaattcctacccatcctaaaggactgtaagcccctcaatccctgaggccaatagggctccctcccactccctcctggtcgacccgccgagtaccctgcacctggtcctctgggtgttcactgtccgccctgctcccctctctggcagccacctcacccaactcgatgctgctcccgggaggtgtcaggggtgtttgttgaatgactaagttaggtgggaacactctggagcctctttctgggagtggagcacactctggtcttctggggcccagggaagtggggatgtgtggtcagcaggaccgagcaggcacccagggcccccaaccagcccaggacacttggactgttgcattttggcccaaggggacccgcctcctgccctcttgcctccatctctacaggaacaccctgcacagagcggggcaggggatccggggccaggcagctcactcctgcgctccttgaggcaacttcctgtcctctccccgttatctccccaaccagaccgaggagaggaagctgtcctctccctcccagcggcagacggagacacccctggacctcaggaagagggggccagccgtgtgaggttgggcctgctccttcggggcctgccttctccctctgctgctcccacccctccccaggcagccctgctgctaccctcctgctcacgtgccttcagtgactccctctgtcacctagttcagatcaattccgcagcttggcctgaagtccatctcgccagcctcatctcacgctcctgctcccacatccactcccagcaccttagagttcctcccattgaactgttttgctctatactgctcccagcccttttccatgtctgttgttacccatcctgggaaacttcttcttctcatctgtacatgtctaaaccctcagcattcttcaaagcccggcttcaatgctgccttctccaagaagtccccctggatctctcaggagccagtggcctgtgcctcctgagcagccatcagcttgtgtgctcctaattgtcatccacagcacccacactgtgtgtctgtccagaataggcgctgtatccgagtcatcatgaggtctctacagtccagcccactgcacgaaggtcattgtaaagttgctctctagggtggggatgtcctgggggcagaagccgtggtgtctgtggcacacaccgctccatctcagttcgtggcacccagtctggcatttactggactctcaaagacattgattggttaaatgaaggcggttctagccaatgcaataagacaagaaaaagaagcagggtgcaaatactagaaagtgaaagaagggatgagcatacccacatccataagtgtgcgccatcctcctcatgagatacatcaggcggcaccccattgtatgggcaggggtttttgtgtgtgtgtgtgtgtttttgttgttttgttttgtttttgagacggagttttgctctgttgcctgggctggagtgcagtggtgcaatctcggctcactgcaacctctgcttcctaggttcaagcaattctcctgcttcaacctcctgaatagctgggattacagacacccaccaccatgcctggctaattttttttttttttttttttttttttgagacagagtctcactctgtcacccaggctggagtgcagtggcacgatatctgctcactgtaagctctgcctcccaggttcacgccattctcctgcctcagcctcccaagtagctgggactacaggtgactgccaccacgcctgactaattttttgtatttttagtagagacggggtttcaccgtgctagccaggatggtctcaatctcctgaccttgtgatccacccgcctcggcctcccaaagttctgggattacaggcgtgagccaccgcgcctggccaatttttgtatttttagtagagatggggtttcaccatgttggccaggctggtctcgaactcctgacctcaggtgatccacccgcctcagcctcccaaagtgctgagatgacagccgtgagacagcgtgcctggccacggacaggggtttaagtctcagagaggggctgggatttgccgatgccacacagtaggttgggctctccctggctctgtactaccttcttccctgccacagtgtcgggcacaaatacatagtgccagtcttgtgctgcacctaccagcaggggagagggctccagctgtcctagcccaagcctgaccagtctgcctgcacggcctcagctggaagtgggttgttagtgcataagacacaaaatccctgtttgccttgtaaattgttacaccccaccgagcttgcaagccttaaggcacaactggaaaaggcattttgagatctgggacttgctccctggtatggggaagaggctgttggcttgggggtgcctgagggcaagtcgtcaggccctgaacctggagggccagcctgactcctgtgtgcaggggctggggggtggggctgcggcttcacctcagggggtgctcccaggcctggggctgggttagggtggctgggcaagtcctcacgctgggctgggttctcccgggtaccaccctagctgtgggagtctgggaacaccccttcccctctgaacgcagggtcgctgtgaagtgggggtgggacagcgtctggaggttgcagggtccccggccgcgaggataaagcggcaggagaccggggccctggccttggctctcaggctctatttgtaggtgcacagcgttccctgcccccactgcctgtagtcctggtttccataacaaccctggactgttcttgacccctgaggctcagctgttctgactttccctcctggatgcccttctgggtcttctcgttcggcagtgccaggtctccgccctggtgttccctgcgtgggcagccagcccagctccctggggatatcctgtcactgtggcccagagcctaggcccggcgtctgccaggtcaggcctaagcgctctgggttctttccaggtcctcagatggggcccgggaacccagagaggtggaggaagttggcagcggcacccagatccccagcgtggcagggctgggcactatgtccaaaccacctgacgcctgggctgcagccaacctctgcggcagacgcacaggtggggctctcggatccatagctgggcctgtgggtgaccttggcatgccctctatctctctacgctgactccctgaagccataacttacggcacacccagcgcaggcccagtggacccaggggatctgcagggcaggtgagcgtggtcattcccagagtggctattgggtgctgggagttgctgggcctcgagctgctgtctggacacagtgggggctcagggtgggagggagcttcagttaggctctgtcccctggcttccaaaaaccagactccaggaaaatgttcaaatttgcaagttggcgtccacgtgtctttaattccctggacccacatcccctcatttgcatacccaaatcagcccacgccctcctgggtcagcccaccccaaaagcagcacttccaaaggcagctgctggggccgatggaaggatgggaccaggagagggtctgcccttggccctcgcagccctctccactgtgagggtgtcaagtaaccgtggttcacacgaactgcatcctggctgatggaggcacggggctaagtgcattgcttcatcctcagaagcagcctcagagtggtgctattacacccagtgaaacaagggccacacgaccagtatatgggacagcagagatttcctgcaggtcatgtggccccagagcccaggctcgtaacctctgtgctggacagaaagagtgctggagtttttgtccctggtcgccaggcagtgcaagttctaactcaaagcccctgctcccgagcactgagttagatagtcctgaagatgggcctggagcctctttggcccccaacatgccctcagtaccctctccaaggtccccgaggtacctgccagtcaccctcggctaggttaaggactccacctgagaagtccgttggcttcagtcttagctctactgcgtgaccttagaggagcggctccacctctctgaacctcagttttctcactgtgaagtgggaagcacggcggtcccagtcctacagggtcattatgagtgccacctgagatggcggacataggggccgggtactgtggctcacacctgtaatcccagcactttgggaggccgaggcgggcggatcacctgaggtcaggagttcgagaccagcctggccaacatggtgaaccctcgtctctactaaaaaatacaacaaatattagccagtcatggtggtgggcgcctgtaatcccagctactcgggaggctgaggcaggagaatcgcttgaacccaggaggcggaggttgcagtgagacaagatcatgccactgcactccagcctggtgacagagcaagactccgtcttcaattaaaaaaaaaaagaaagtggacatagagtggccagcatgggcccactgggctgctgattctcacagtgcccacctttttcttgcatccacttccagggacccagcctgtttcgggcctctgttccccaggacactcccgctctgatcagactgtctgtgacctgagcaggaagctagccaaaggcaatacccacccagatcctggaggcaagaggccaacaggcgggaacaaagatttttccatggttccactgttaatgaggaactgacacactccagggcctcaactggtctttcaccctcctctccttccccaaatttccatcattggtgatatttacattggaattatgcccaggacttcaggaacccagcatgggtaagtggaaaacaatgcaaaagaaaagaggcgtatttttaaaggcagtgttggcaagtttaaactcttggttttaaagcatattacaaaacagtgagcatcagaaccaaatggttatgtgtttaaatcaattcagcagggcttctgtcaattgcaaggcactgctgaagtgcaaagatgaagataatgatgaagatgaagagagggaagaacctctcttccctcaagaggttcacagtctggggtggtatataagcagcaggtacctagtcatgtgtggtagctaagagcaccctctatggggacagatctcggatgagatccttgccagttatgagctgtgtgatcttgggcaagttacaaagtatctgtgagtctcagtttcatcatctgtaaaatggaaagaataataggcctcacctcagtgggctttgtgagtttgagaagatacatggcagcggtagctggctgcccaacagagatgacagcccttttgctaatggaagcctgaatttgctccaggtagcaaaagtgccaggcccggtggatgaatcatgagtgggctaacccattgacagcgatgcccttctctttgctggatactggctttcccagcatccctggcagctaagggtggtcatgtgacccacctctggccaatgagttataagaggaagtctgctgagcttcctgaataaaatacagaggaggaagcctttgctttccctactccctgcctgtgatgagcttatgatgctggaattgcagcagctgttttgtgcccatgaggcctccatcttgaggatgtaaaacccaacaatgaggacggcggagcaggaagatgggggcattgctgagctgcagagtagcccgagatgactaactcccagacttcttgttctgagagattatctttatttatttatttatttttctaattttgatacagggtctcgctctgtctcccaggctgcagtacagtggcacaatcttggctcactgcaacctacacctcctggcctctagcagtcctcctgcctcggcctcccaaagtgctgtgatgacaggcatgagcgcctgtgcccggccaagagatgatcttaaaagcctttattggctgggcgtggtggctcatgcctgtcatcccagcactttgggaggacgaggcaggtgaatcatgaggtgaggagtttgagaccagcctggccaacatggtgaaaccccatctctactaaaaatacaaaaaattacctaggtatagtggcaggcacctgtaatcccagctactcaggaggcagaggcaggagaatcgcttgaacctgggaggtggaggttgcagtgagctgagatcgcgccactgtactccagcccaggtgacagagtgagactccatctcaaaaaaaaaaaaaaaaaaaaagcctttactattcaaagcaattgggttcttggtggtctgctccttccagctgaattcaccggagtgcgataggccctcagcaccatgcttggcacatgggaaatgctcactaaatgccagctgtggcatcatagagaggtctcagcatagtcgcctttatctctatgctcagtaggtagagaagaagcgaggagagaagagtctgaggggtgggtgactccacctgccgtctccctccgtgggtgggtgtgatggagtcatggttccgctgtcccttcatccctcaggacctcggagggtagagacggctttgggtgtaggatccactggggaaaccaaaacctgccaggcccagcgaggctggtgcaaccggcaggtgccggcatcgtgcccttacctcttcctggaggtttcaagggtaattctgcgcattcccgggcctcatgctgcgactctggagtggtggaaggaacacagcttggtgtcgtgtttgaatcagaattgccagaggtgctcatttccccagctggatggagcagctgaaggagagctggcagatggaggggctgaccccacgccagaggtttctcactgagaacaaagaaaggaaaagggagaaacacagctcacttacagcctcagtgattaattagtcttcatttatgaacgaacaccgtttgctacaaggaaccctcctgtgacttcattcaatgttctagcccagagttaacacaggcttgggagggagaggacgtctcaggagctggcagcgttcatatgaaatgtcagtggaggtcaggtgccgtggcttatgcctggaatcccagcattttgggaggccgaggcaggcggatcacctgaggtcaggagttcaagaccagcctggccaacatggtgaaaccctgtctgtactaaaaatacaaaaattagccaggtgtggtggtgggtgtctgtaatcccagctactcgggagtctgaggcaggagaattgcttgaacctgggaggcagaggtttcagggagccaagatcgcgccaccgcactccagcctgggtgacagagtgagaacctgtcgttaaaaaaaaaaaaaaaatgtcagtggagatggggcaggaatggaacttacagtcaaggatggaactccctgagaggaacacattcttggcccctaagcctttctttgtagcttcctgggttgcaaatattccatacttgtgttttgttatgttttgttttgttttgttttgtttcaaggaggtagagctgtttagaggcggaagtgaggagcacaggccctgctctgcatttgcctacctgagcaacgggaataaagccggactccgcctcccctggtgctgtgtggcttcgcgggccgaggcgctcagcactgagcccagggcctgttggtgaaaaacgcgtcgctccaggcgtcctaagcgccagtgatgtagctctgcgctcatgcacggaaaggcacctgagagcgcggacgaggaatgggagggccttgagccgtctcgccctgtctgtgaggtgctaatggacccagtgtgcaatgcatcagacatctcgggagacagagagaggaatcgcccaatccgtcaccctggagagctgtcaggaaagagagtgtggctctgcccctccccctgtgaatgacacaagggtagaccccagggtgtttgacctggaaagggcctctgagtcacctcctccaacctccaccttgtgcaggtgggagatgaggtccggggaggctgaggggcttcccaagttgacatgcggggagaaggagagaggagaagactcagcactgaagagacagggagtgcttcaggaaggaggccagtgagggcgagtgaagacaacacacacttgtgtgatgacattttctacagtaaacacccagggaaaagccacagcatagggaccacaagggacaggggtgctgctgcggcggccacaccttgctcacctacggtgacaccgggacctggcaccagttcaagcagcgcccacagcggaggagcaacctggaccccaggtgccccggccgcgggctgcggctcaggataggaaaggatctccctctcgataaaagaagtagacaggccgggcgcggcggctcacgagaggcctgtggtggttcacactgttttagggggacccttctgcccaggggaaaccttccccagagaatcaaggagctgctgtggccgagacagccgcacacggagcctcctgggtagacagagcctgcctttccagctgcggagccccggccattccttgccctctctggccttagtgaccctattaatacagctggggctgcacaaggagggtctcaccagccctttgagtccactcactctagggcctcagaaatcccccctggctgcacctctggcctcctcaagggctgccgggaacgccaggacccctggggccacagcccctcccctgcttccagcctccatgcctccacccagcctccacccacaggccgccagcagctctcctggttcacccttggccctttgtgtttactgaaggcctatgtgaggggtgagttggggaggccagcaggaagctgaccatactcctgggatctgccagagaaaaagaagccccttcaggtccagcagaggctgagcttgacgtggtggacgagtcgggtctctttccattgcaagggggcagaagcctgattcaaatgggctgaagcacaaggggaaaatcgtcggctcatttcactgaaaagtccaggggatggatggcttcaggaaaggcaggatcaagggctcacaagtgacatctttaagaattcacctctcagctgggtgcagtggttcctgcctgtaatcctagcactttgggagtctgaggcaggaggattgcttgagcccaggagttcaagaccagcttgggcaacatagtaagacccccgtctctacaaaaaagaaaaaaattagccaggcatggtggcgcatgcctgtagtcccagttactcagaaggctggggtggaaggatcacttgagcctgggaggttgaggctgcagtgagctgagatctgtttcctctgtggtggcattctcgcctcatgatggtaacatggctgccagcagccacacccaacatcccacttgagtgccccccaaccaggagattctctttgccaatggtttaatcaaaagcatttgatttgaggccgggcacagtggctcatgcctgtaatccccacactttgggaggctgaggtgggcggatcacctgaggtcagaagttcaagaccagcctggccaacatggtgaaaccccgtctctactacaaatacaaaattagccaggcgtagtggtgcatgcctgtaatcccagcaacttgggaggctgaggcaggagaattgcttgaactggggaggtgcaggttgcagtgagccgagatcacgccattgcactccagcctgaagagtgaaactccatctcaaaaacaaacaaacaaacaaacaaacaaacaaacaaaaaaatcctttgatttgagcctcctaatgggctctcacgggatatgggttctgttcccatttctggaccaatccctgcaatgctccagttggttacatggagtcatgtggtctgaagtcactgcaggaggtcgggggaggagggctccccaaaagacagtcaagatgcagacattggaagaagaggtgctgggcaggcaggagcgcagacggccaccgctgctggcagggagcatgctgggtcagggacctccttctgggggtaccaagtggagcccagctctgtatgagctgcggtgaattccagagaggagcaaaatgagccacccagtgcctggtcccaggccagccccaagcgccaagtagcatccacagctgtggcggctgtgggaggcggcttatggcccagggtgtgcgctgagtgcacagcaacccagagactcagcctctcggacgacgaaggggctgggaaagggcccgtggcctcagcagacaagtccctcctgggtggctgggagattcttaagggaaatgccatttgatctgtattcttagaaacaggaagtagcagcttcctgtaagcaaactgacctcatccccaagccctgggatggcccctgggtccaaccacttccaaagggatgtggctacctctcactcagggaagcatcatgagccaatccacacttatttatttatttatttatttatttatttatttatttatttatttgatatggagactcgctctgtcgccaaggctggagtggagtggtgtgatctcggcttactgccacctccgcctcctgggttcaagcaattctcctgccccagcccccccagtagctgggattacagtcttgtgccatgatgcccagctaattttttgtatttttagtagagacggggtttcgccatgttggccaggctggtctcgaactcctgacctcaggtgatccacccgccttggcttcccaaagtgctgggattacaggcgtgagccaccgcacccggcctctctgtttacacttccattctcaaagtgaatcatcatccatttaaataaaggtgtccttcatcacaggtccttggtaagggagtactggctgtgtgtcataagctttatctactgaatcttctctgattctgatgcctcctatgtgctaacacctcccatgtgctcatcccattcatgcgctcatcctttctatgtgctcatccctcccaagtgctaagacctcccatgcgctcatccctcccatgtgctcatcccttccaagcactcatccctcccaagtgctaacacctcccatgcactcatccctcccatgtgctcatccctcccatgtgctcatccctctcttgcgctcatccctcccatgcgctcatccctcccatgcgctcatccctcccatgcgctcatccctctcttgcgctcatccctctcttgcgctcatccctcccttgcgctcatccctcccatgcgctcatccctcccatgcgctcatccctcccttgcgctcatccctcccatgcgctcatccctcccaagcgctcatccctcccatgcgctcatccctctcttgcgctcatccctcccaagcgctcatccctcccttgcgctcatccctctcttgcgctcatccctcccatgcactcatccctcccaagcgctcatccctcccttgcgctcatccctctcttgcgctcatccctcccatgcgcgcatccctcccatgcgctcatccctcccttgcgctcatcgctcccatgcgctcatccctcccatgcactcatgccaacatcttccaggagcaaacaccttcctggggactatgaaggactttcactaaatagcacagagcaaaatttggaactacctctaccttcacttggatattgatggctccttgctttgcacctctgtcaaggtcagagtctggaaggtgagggatgaggactgtccccaaagcctccccaaaattacagttcagaaagaaattcttgctatttctctgacagcctgtctgactgggggagcagggagcagagggtctctagctggggggcgtgggtgcagcccttggacctggccctgacttgctaggtgactttggggaactccctgggcttcagacaccctcagggccccctcgggccccctggctctgtgttggcaaattcttggctcccaggtgagcctgggtcaagccacggcctccctaccccagcctccactgccacctccaccccgcggttcccatggcggcggcccgtggttctctgtttactcagctctctgtgatttttccataaccggccatcgagaacacaatgccagcttccccccaaggaggtgccgcagagcccacgcctgtggccaaacagcggatgtgactttccagccggggcagacactgacaccaggcatctcagactcccgtggtccctcctggaccaagacctcagctttctgaaagggggtgcagaaagccaggctggcctggggttccatcctcagaaacatgtgtgaaaccctgagcaagtcgctttccctctgagatgacgatagggctgtgaaatgggtcgcatcccgcatgcaattctaaaagcccacaaccttgaagggcccgcctcagctcttcccaaagaggcagccctgcagcccctgccccagcagccccagacacaaagggtccgggactccggcagcgaacatttcctgccagagccggctctgggccaagcacagcctggccacgctcaggtcaaaccaatagtgtggcctttgccctcggtctcctgtcctgggccaggagcagacctgggttaaaacagcaagtcacagatccgaaccgtcactgggttctctactcccaaagggatacacccccattgggaacaatctaacctggaaagagtgagaaagtaagtgtcattcagcatctcgggtacctgctcccagatgttcccaggcacgtgctgctcacccacacctggcatgcagcatgtgctaaaaatagctccagtctgagcatgctgcatgactgaacccgctctatccccctctgaggtgttcctcctttgactgtctggggactcagaggctcagggaggtgaagcaacgtgcccaagagcacacagctgtttgcaatagatccaggacttgaacactgattgagagttggattcctgaattcatgaacttgacccctacactatgttgcctggaaatgctaactttttttttgttttgaggtgaggcatggggggccaggagctgagaatcgttagccataagccccgtggccctctgagggacagtgtcccccaggaccatccaaggtaggggtgataaggggctccaggcttcctcctggctcttgtctcagcctcaccccaaacccagcctcaaggctcttcgcagagctggcccttccccttcggccagtggcggacccctcccctcccagccagcctgcctaccctggtgcccgcgtttgcagctctctcccgccttccccagtttcttcccctcttgcttcatctttctgcccagcttctgcccatgatatccctttctcccagtcagcccctccccaccctcccagacacaaaccatccatgaactgggtctggtgtttagtggatctgtcctttccagaatggtgtgagcgtgtcctctccccagggttctcaggggacctgggagacgcctaccccaggcgtctgttcggctcagacaactgaatatccacgcataaaagaacaagttggactttggccaggtgcagtggctcatgcctgtaatcccagcactttgggaggccaaggtgggtggatcacttgaggtcaggagttcaagaccagcttggtcaatatggtgaaacctcatctctaccaaaaatacaaaaatcagccaggcgtggtggcatgcacttgtaatcccagctacttaggaggctgaggcaggagaagcacttgaacccaggaggcggaggttgtcgtgagctgagatcatgccaatgcactccagcctgggtgacaagagtgagactctgtctcaaaaaaaaaaaaaaaaaagaacagtttggattcttacctcacaccatatacaaaaatcaactaaaaatggatcaaagagctaacactatccaactcttagaagaaaacatggggggcttggtacagtggctcacacctgtaatcccagcactttgggaggctgaggtgggcagaccacttgatgcccaggagtttgagaccaatatggccaacatggtgaaaccccatctctaccaaaaaaatacaaaaaaaattagccgggtgtggtggcacatactcatagtcccagctactcaggtggctgaggcaggagaatcacttgcttgaacctgggaggtgaaggttgcagtgagccaagattgtgccactgcactccagcctggttgacaaagagagactctgtttcaaaaaaaaaaaaaaaaaaaaagaacaagaagaaagagaaaacatggggttaaatcttaataatctttaatttgacaatggttttttagaaaaacactgaaagcatgagcaacaaaagaaaatataaactggccttcatcaacattaaaaacttttgttcatcaaagaacactatgaagacagtgagaagacaacccacagaatgggggaaaatccttgcagggctggtttccaaaagtcacaggataaatggtatatgttattcaaaggtttcttggagaaaacttttttttgagaccagggtcttgctatgttgcccaggctggggtgcagtggctattcacagatacaatcatggctcactgcaactttgaacccccggcatcaagcaatcctcctgcctcagcctcctgaataggtgggactacaggcatgtgcctccacaccaggctgagaaaacattctttacatgttaaagcataatggttgagaatgcaaaatttacacaaaatgtaggctacagtgggagacattaggaagtttggaatctgaagccaagcactttcgggaatgtaagttcaactttttggtattctgccaatgacggggcttgtgtgggagagttcccaaaatcttcagagattctgtggatagaaggacccagagggctggcttactgggcgggcctggtagggagaccacaggcaaggtcacaggcaaggtcacaggcagattagaggcaagatcacaggcaaggtcacaggcaagatcacagacaaggtcacaggcaaggtcacaggcagatcacagacaaggtgagtcacaaggagcacacctgaggcttacagggctgaggactctgcaaggttaaaattggcctgccccatcaccccatggacctctggcctcccgctgcacctggttcctcgctcacggaatcggttaggcctcttttggttgtaagtgacagaaacacagctcagagtagttgagcaaaaatgggaaactcttggcttaagggaatgaacagcccagggcagctggcctcggcttggctgtggcgggggacaagcatcagtggactttcctctttgcctggctctccacaggcattggggaaggccaaggctctcttctcccaacaaccccagaagagaaaattcctgggactgcgccttgctgggctgacttgggtcacacgcccacccacggcctatcactgcagcgagggagtggaaggctcctactggccgggcctcagtcacaggcctgctccttggagtgagctgcagggagaagaaaacttgcaggggacgggtgcaaatggcaagaacaacaaggctcaaatgacagtgctcctgtagatacgggtagaacgcaacatacaggcctgggtgctctgctccgtgtagggtgggcgtgaggcctggccggggcctcggcctgcagggccgtgtggtggcccaggcccagtgggctgccccgggtcagggctccgtgagaaacgggcagctcctgtttgttccaaactcccagtgcctctcaggcaacctggaaaaacacaattccccgagcaggaaacccgccacatattccagcctggagcccagaaagccagaccttgtgacaatttaaaaacaaaacttgaaaatgccagctctcacaatagaatgtaaaaaaaaaaaccctgtattttccttttttattatatgagtgctacatatttattgcagaaaaaattcaaaatacagataagcaaagagataaaatttcccataatctcaacactggtgatgaccaatttaatattttattgcaaattttgacagttttttctctataggcaaaaaaatatttctttcttacgtaaatgggattgttggcattatttataacttgtttttcactcagtaatactgggcgaacattttttttttttttgagtcggagtctggctgtgtcacccaggctggagtgcagtggtgtgatctcagctcactgcaacctctgcctcctgggttcaaacgattctcctacctcagcctctcgggtagctgggactacaggcacccaccaccacacccagctaatttttgtatttttagtagagatggggtttcaccatcttggccaggctggtctcaaactcctgaccttgtgattcacccatctcagcctcccacagtgctgggattacaggcatgagccactgcgcccagccaaactgggtgactatttttacacatcaataaatatacatgtgcaatataatttttaaccacctacatagtatttagaggcattgaatacattccgtaatgtgcatgttttgagggtgtgtagtgctggaacagacatagctcggcatattggccaatgattccagtcatctcaaattcctagaaggggagcagcgagggcaagggctctgaccctgttgccaacgccactgcacagagtgaaccgaagagcttagattccctcgctacctgcacagccggtgcctggtgatccacgccgcccacactcagctttctcattcattgtcattcttgccaatctggtaggtgaacaattacttcttctgtttccttcttcttcctcctactccttcttcttctttcttctcattttccttctcctcctcctctctcctccttccttccttccttccttccctccctccctccctgcctccctccctccctttttctctttctttctttttctttctttccttccttccttccttccttccttcctttctttccttctttctttctttctctttctttctctccctctctctctctctctttctttctttttcttttttttgagacagagtctcactctgttgcccaggctggagtgcaatgccacgatcttggctcactgcatcctccgcctaccaggttcaagtgattctcctgcctcagcctcccaagtagctgggattacaggcgcccaccacctcacctgcctaatttttgtatttttagtagagacggggttttaccatgttggccaggctggtttcgaactcctgacctcaggtgatccgcccgcccactttgtaatcccaaagtgctgggattacaggcttggaccaccacacccggcctcctcctcctctttctcatgctcatatttctctttctttgtatcctctttctccttctcctcctcctcctgctcccatcccccttcctcttcccttcctcctccttcctcttgtttttttcttgcgtttctctgattactcctccaggtgaacatttaccatctgcttattggccatttgtatcttttcttttgggaattgtcagtttctggttcttggccatttttctgtcggtgggtttatctttattttattgatttacaagggctccttgtagattatagaaaataaccttttgttgtaaattttttccagtttgtcatttgtcttctatttttatttattatttatggatcatttgttttattaaaatcttgattgtgaaaataacatttgctcattgttaaggattccaacaatgcagagggataagaggagggtagaaatgctttctcctctctcatcccgtgcccaatcctcaaacagaaccactccacactgctcacctgtgctattagacagtttcttttcttttctttctttctctttctttctttctctttatttctctctctcttcttccttccttccttcccttcccttcccttccttcccttcccttccccttccttcctttcttccttccttccttccttccttctttctttctctctttctttcttgagacagagtctcactctgtagcccaggctggagtgcagtgtcacaatctcagctcactgcaaccttcgcctcccaggttcaagcaattctcatgcctcagcctctcgagtagctgggattacaggcgtgcgccaccacacccagctaattttttcttttgttttttttttgtatttttagtacagacagggtgtcgccatgttggccaggctggtctcgaactcctgacctcagatgatccacccgtcttggccgcaccaagtgctgggattacaggagtgagccactgcacccagtcaacattttctatgtttattcaaaaataaatatttataaatccattcgttcaactgtcaacctaaataacaaacagggagaggctgtctaaaaggaaaagattgccaggcacagtggctcatgcctgcaatgccagcactttgggaggctgaggcaggtggattgcttgagcccaggaatttgagaccagcctagacaacatggcaaaaccctgtctctataaaaaatacaacaacaacaacaaaaatgagctggccatggtggcgtgcacctgtagtcccagctacgtgggaggctgtcctgggaggatcacctgagcccaggaggttgaggcagcagtaagccacgatggcaccactgccctccgtctgaatgacagatctcaacattttttttttttttttgagatcttgtctcggaaaaaaaaaaaaaaaccccaaaaccaccaaaacaataaataaacaaataaataaataaaagtaaaagatatttattattcccaactaactgacacaactaatatttgttaagtgcctgtcgagtcaggccctgtgctctaatttgggcacaaaatgatgaacaaaacagatattgtctctgccaccatggagcttacagtttaacagggagatgctgatacaaaaaaaaaaaaaaaatccatgtcagtatatgtacacattgtgatcagtgctgtgaagaaagataataaagggcgctgtggaggacagcctccacgatcccccatgatccctacctcctggaattcaagcccttatttcgtaccttccccttgtatgggggtaggactcattgacttgatgatcacagacactaaagcaaaagtgttggagtgtgacctctgagattgggttataaaaagactgtagctggctgggcacagtggctcacacctgtaatcccagcactttaggaggccaaggcaggaggattgcttgagcccaagaattcaagaccagcttggacaacataggaagaccctgactctacaaaaaataaaaagattagccaggtgtggtggcaggtacctgcagttccagctactcaggagactgaggtgggaggatggcttgagcctggaagtttgaggctgcagtgagccatgattgtgccaccacactccaacctgggtgacagagacagaacctgtctcaaaagaaatgactgtggcttccagtttgggtggtcttgctcttggatcacttgtgccaggggaagtaagctgccatgttgtgagttgacttatggagaagcccatgtggcatggcaaagaactgagaggccctcagtccaacagcctgcgaaacactgcagcctgcaaaccaccatgtgagtgaacagatctgttagctccagccaagtctcaatatgactgcaactcgtgagaaccttgagccactgacgcccagctaagctgtgcctggattcccggcccacggaaactgagataataaatgtttgttgttacaggccactaaatttgtaagtcactgggtttccctctgtagatcaatttggagagtactaccatcttaacaaatttaacgcttctgatccacagatatgggatgttactttctgcttatttatatattatctttgtttgcttcatgttgctacaacagaatacttgagaaagaataatatataaaggaaaggggtttatttagctcacagttctgcaggctgggaagttcgagaagcatagcactggcatctgctcagcttctggtgagggctttcctgctgcatgaaaatgtggcagaaggtcaaaggggaagcgagcacatgtgaagaaacaaaacctgagggctgtcctggctttataacaacccactctcacattctcatgagatgtttcttatgagtgtggatgcaaaagtcctcaacaaaatactagcaagccaaatatttgtaaaagtcctcaacaaaatactaacaaacatttttataaatgcccatgagaacaaatccggtctcacaagagctagaactcactcactaccacaagaatggcaccaaggggcctgtgagagtggaacccccccatgacccaaacacctctcattagactccacttcttaaaggttctgacatcattatattggcaattaagtttcaatatgagttttggcagagacaaaccacatccaagccatggcagatctttaatttcttccaacaatgtttcatggttttcatgctataagttttgtacttcttttgataaatttatgtctaagtattttattctttttgatgctattgttaatagaatcttcttaatttcatttttggattctttattgaaaatgtacagaaatacaatcaatttttgtgtattaatcttgtattctgcaaccttgctgaatttattagtgttacagtttaatagggggatgctgataccaaaaaatccatgtcagtatatgtacacattgtgatcaatgctatgaagaaagagaagaattggcactggggagggtagcctccaagatgcccccatgaaccctgcctcttggaattcagtaattttttactgagttccttaaaattttacatatggaagatcaggttacctacaaatagagatagttttacttcttttctaaactggatggctttttgcttctttttctatcctaattgtcctacctagaatctcccctacaatgttgaatagaagtgctgagagtacacatccttgtgctgttcctgacttaggaagaaagcatccagcttttcattagtaagtttgatgttagtgggttttttataaatgccctttgtcaggttaaggaagcttccttctattcctagtttgttgagtacttttatgatcaaagggcttgggatcttgtcaaatgcattttctgcatcgtttgagatggtcacatggttttttttcttatgctattgatatggtgtattacattaattgatctttggatgttaagccaaccttgcattcatgtggtaaatcccacttcatcagggctgggcatggtggctcatgcctgtaatctcaacactttgggaggctgaggtgggtggatcacttgaggtcaggagtttgagaccagcctggccaacaaggtgaaaccccatctctataaaaatacaaaaaaggtagctgggcatgatggtggacacctgttatcccagctactcgggaggctgaggcaggagaatcacttgaacccgggaggtggaggttgcagtgagctgagattgtgccactgtacttcagcctgggtgacagagtgagactctataaaaaaaaaaaaaaaagtctgtttcatcatgatgtagaattcatatgatgtgaatttggcttgctagtattttgttgaggatttttgcatccatattcataagaaacatcaatctgtagtttccttttcttgtgatgtcttcatttggttttggtgtcagtgtaatactgccctcataaaatgaattgggaagtgttttcttcttttctattttttgaacagtttgtgaagaattggtattattatgtattttatttatttatttattttgagatggagtcttgctctgttgcccaggctggagtgcagtggcacgatctcagctcactgcaacctcctcctcctgggctcaagcaattctcctgcctcaacctcccaattagctgagattacaggcacctgccaccatgcctggctgattttttgtattttttgtagagacagggtttcaccatgttggccaggctggtctcaaactcctgacctcaagtgatctgcccgccttgggctcccaaagtgatgggattttaattattctttaaatgtttgttagaatttcccactggagtcatctggtcctgagcttttctttgtgggtagtgttgtgattatctctatttgttatctctattcaaattttgtttcttcttccatcagtttttgtagtttccacctttctagaaatttgtccacatcatctaagttatctattttgttgacatgtaatagttcatagtattcctttataatttttttatttctttgatgttggtagtaatgctccttctttcatatctgattttagtaattgaagttctctcttattttcttggtcaatgtagctaaaggttttcaattttgttggtctttttatagagccagcatttagtttcactaatgttctctatttttctattctctatttcattaatttccattctaatctttgttctgcttcctttaggctttcttattttgctcttcttttaccattgtcttaaggtggaaagttaggttactgatttcagatcattattttattgtagacctttacaactataaatttcccttctactaaaaagttcttccctaataagtactactttagtggtatcctgtaagttttgatatttttgtgtcttcattttcattcatttcaaattattttctaatttcccttttggttccttctttgaaacattagttatttaggaatgtgttgtttaatttccatatacttgtgaatctctccaatttctttcaacagaataatgatttctaatttcattccattctggttggagaacatactttgtattatttcttttaaaatttattgggttgggtgtgatggttcatacctataataccagcattttgggaggctgaggtgggagtattgctttagcggaggagttcaagaccagtccaggcaatatattgagactccatctctacaaaaaaaaattaaaataaactaaaatatattgaggtttgctatcgcctagaatagggtctgttctgggtaatattccatgagcacttgagaaaatgtatattctgcttttgttgggtagagtgttctatagacatccatcaagtcaaattggttcatagtgttgtttaagtcttcaattttcatgctacttgtgagaccgaagtaggaggattgcttgagcccataagttcaagatctgcttgggcagcatagtgagacttattctaaaataaatacataaatgatgttcaatttccttgttgatctcctggctacttctttttttttttttttttttcttttttttttttaattgatcattcttgggtgtttctcgcagagggggatttggcagggtcataggacaatagtggagggaaggtcagcagataaacaagtgaacaaaggtctctggttttcctaggcagaggaccctgcggccttccacagtgtctcctggctacttctatccactactgaaagtggggtcttgaggtctccagctatcattgctgagttatctattccccgcttcatttccgtcagtttttgcttcatgtgctttggtgctctgttactaggtgcatatatatttataattgttatatttacctgatggattgacccttttataattctaaaatgtccctagaagcattttttttgttttaaagtctattttgtctgataaaactatagccacttcagctttcttgtgattgccctttgcatgatatatcttttttttattcttttgcttttcatctatttgtgcttttaaatctaaaatgtttctccatggacagcatatagtagaaccttgtgtttttattttttattttttgagatggagtctcgctctgtcgcccaggctggagtgcagtggcgcgatctcggctcactgcaacctccacctcccgggttcacgccattctcctgcctcagcctcctgagtagctgggactacaggcactcgccaccacacccggctaattttttgtatatttagtagagatggggtttcaccatgttagccaggatggtcttgatctcctgacctcgtgatctgcccgcctcggcctcctaaagtgctgggattacaggcgtgagccaccgtgcctggtcgaatctttttttttatccagtacaataatcttccttttgattacattgtttaatccatttacatttaatattattggtatagttggatttatgccgccattttactttttgttttctatgtctcaagtcttttctgttcctcattcttccttcactgctttcctttgcattaagtgaatattttctaaggtagcatttacatttctatgatgatttttttgaagtatatttttggcattttcttagttgttgatctagggttttatatacttttttttttttttttgagacagcgtctcactctgtcacccaggctggaaaacagtggcattatcatggctcaccacagacttgatgtgctgggcttaagcaatcctcctacctcagtcgcccgagcagctgggactacaggcaagcaccaccatgcctggctaattttgtttattttttatagagatgaggtctcactatgtttcccaggctggtctccaacccctgagctcaagcgattcatcctcttgccttgggctcctaaagtgctgggattacaggcctgatccattgcacctggctatacattttaacttactagaatcagcttctgatttatttatttatttatttttgaaatagagtctcgctctgtcacccaggctggagtacagtggcgcaatatcggctcactgcaacctctgcctcccaggttcaagcaattctcctgtctcagcctcccaagtagctgggactacaggtgtgtgccatcatgcctggctaatttttgtattttttttttagtagagacagggttttgccatgttggtcaagctggtctcaaattcctgacctcaggtgatccacctgcctcagccttccaaagtgctgggattacaggcatgtgccaccgcgcccagcctcagcttaagatttatattaactttaattttaatgagatgtagaaacatgactcctatgtagcttttttccctttctctcctttttgtggcattgttgttataactatcacatctataaatgttacaagcccaacaataagttgttataatcattactttaaataattttatgttttctacagaagctgagagaaaaaggagaataagtatatacagcttttattatattaatcctcttttttaaaaaaataatttctaggccgggcacggtggctcatgcctgtaatcccagcaccttgggaggccgaggcggggggatcacttgaggtcaggagtttcagaccagcctggctaacatggtgaaactccgtctctactaaaaatacgatagccaggtgtggtggcggcgcctgtagtcccagctacttgggaggctgaggcaggagaatggcgtgaacccgggaggtggaggttgtagtaagccgagatcgcgccactgcactccagcctgggcgacagagcgagactccgtctcaaaaaataaataaataaaataatttctagttctcttcatttcttctcgtggatttgagtgacatctggagtcatttccttagcccagtacagctttgctcccacccacctttcttgtcttgcttttggtaaatatactacattttatatgtaataggcctaacaatatgttatattcatatttatacagttgctttttaaatcagttgagaagaaaaatgaatttatactgtcttttataattgcataattacttttaccagtgctttttgtggattcaaattgccatccggggtaacttgcttttagcctgaagaactacctttttttttttgagacgcaattttgctcttgttgcccaggctggagtgcaatggcgtgatcttggctcactgcaaactccatctcccaggttcaagcagttctcgtgactcagcctcccaagtagctgggattacaggcgcccgccaccacgcccggctaatttttgtatttttagtggagatggggtttcaccatgttagccaggctggtcttgaactccttacctcaagtgatcccccccacctcggactcccaaagtgctgggattacaggcgtgagccaccatgcctggccttgcccagtttaattttgtctcaaattatattgcctgatgctgaataactctgattttctgtttgcatctgcttgatagacatgtgctcattcttctgcatttcacctttttctggtcttaagatcagttgttttaaatgtctgtctctccacttctgttgcaaatttctaaactcactagtggataagctgcctgccacatctgggggcatcttgcctggccgagtggttgagtggtccagctgatgtgttgacgaggctcacagtggctgcgtgggtacttctgccattgtcatggatgctgtgttgctcagcaattctgaggtgacaacacaaactcatgggtctcccaggtagcttttaaaacagtaaattggccgggtgtggtggcttacacctgtaatcccagcactttgggaggccgaggcgggtggatcatgagatcaggagatcgagaccatcctggctaacatggtgaaaccccatctctactaaaaagacaaaaaattagccaggtgtggtggcaggcacctgtaatcccagctactcgggagactgaggcaggagaatcgcttgaacccgggaggtggatgtttcagtgagccgagatcgcgccactgcactccaccctgggtgacagtgagactcggtctcaaacaaacaaacaaaacaaacaaacaaaaaacagtaaattaactcacggctagaagataccagccaacagcttgggaagcctcacatgaagagagagtgagaagccctctccactggggaatcagaggtggtcagtggccgcgaggaagaggagagagccatcacctggtgctttaattttcgccctcacctgcctgaaaacccaggtggaagcagggcaggagaatgagcggaggaggaagaggaggaagaggcaggatggagggcgggagagagagggagccgacatctttgagtccctggaatttagctttgcctggggctagaggcaaccctcgggcttttcggttttgtaagtcaatccatttccgtgttaagttagtttggagtgtctttaacttgcaactgaagaaatcccaacgaatcctgggacagcgcctccagataggaagtctagaagctggttgggcatgagcaaagctacgtacgccaagaaccccaagagagaaggagaatttggtaatggagcaactggatgccatctgtggcttgactggacactgttggaggcctttttatttctggaatttttacatttcctttccatatactgtccatatttaatgtcatgagaagagagctgtgacattatttcaacctactggagccaaattgttgcataaagttgggtcagaaatactttccgctgaggtgagaggacaccttgccacctcctggagatgggtagttctagggctcaaacaatggaatgaaggagtcagactgtcagactcctggctttctgctcccaccgccccagagtgttggcttgtcagcctccagctgacatctcgtctcggcacaaagggagtgcgtaggagcagggctccttccccagagcctctggagaatgcagccatagagccgccttgttaccagaaaggggtcccaatccagaccccagagagggttcttgaatctcatgcaagaaagaatttgaggtgagtccacagagtaaagtgaaaacaagtttattcggaaagaaataaagaatggctactccaaaggcagagcagcctcgaggtgcccatttttatggttacttctttttatttatttgagacagtctcactctgttgcccaggctggagtgcagtagcgtgatcttggctcgctgcaacctccgcctcctgggttcaagtgattctgctgcctcagcctcccgagtagctgagattacaggcacgcaccaccatgcctggctaatttttgtatttttagtagagacagggtttcaccatgttggccaggctggtctcaaactcctgacctcgtgatccatctgcctcagcctcccaaagtgctggagttataggcatgagccaccgtgcctggcctatttcttgattatatgctaaatagaggtgtgttattcatgcttcccctttttagaccatatagggttacttcctgacattgacatgccatttgtaaactgtcacagcgctggtaggagtgtagcaatgaggacaaccagaggtcactcttgtggccatctgggttttggtgttttggccagcttctttactgcaacctgtttcatcagcagggcctctatgacgtgtatcttgtgccgacctcctatctcgtcctgtgactcagaatgtctaaccgtctggaaatgcagccagtaggtctcaaccttattttacccagcccctattcaaaatggagttgctctggttcagacacctctgacggcctcactgcaagaagggctgggacacagaagcgagcttacttggggtgggcagggggagggagcagggaggacttaatcatgactttcctcatgagctagtagaaagtcctacctttcttgagattaaactgtgtagagtcaccacctgcaaaaaattggattttgtcagcagggaaggaggggaggggtaggagatggcagctagggaagcgacagggccgtgttttatttatttttattttttgagacagagttttgctctcgttgcccaggctggagtgcaatggtgccatctcagctcaccgcaacctctgcctcccaggttcaagcgattctcctgcctcagccccctgagttgctgggattacaggcatgcgccaccaggcctggccaagtttgtatttttaggagagacggggtttctccatgttggtcaggctggtctcgaactcccgacctcaggtgatccacccacctcgacctccctaagtgttgggattacaggcgtgagccaccacacctggccagggccgtgttttgacttggcttccgtctgagtgcctgggctgctcactggtggttccgcatgaagccccggcgctaggtctgtggagggcatgtattgagcgggtgagcgcgcgctgagcgcctctgtgctgcagccgtggctgggggccggggctctccacccgcctcccgcgtggttcgaggctgacttcccaccgcttctgcctctcgataaatgaggctcagctggtggaaccctgtgtttctcttcagttctaaaagcttgggctcaacttgcttggctctctgtggccttcttcttagtccgctggtgctggcttagtcacactagccgggcagggctcagatggacgcgcctgcttttcagagtgaagccccagtgtgctccggacaaggtgaggcggggagggcatcaacatttgcaccaggtcctagagatcgcctcgggagcggcacaggcctgggagcacccagtcctgctgagtctcaggtttctctctgggctgagggatagtgagggctgaggctgggtccagaccctgcctggggctcccccgaaagcagtctggggctttgggggatgtgtcagactctgtcgggctggaacaaatgggcctcaaaggttggttaagtgcagcccctgccaagaaggcacgcttctgtaatttgccagacagtcctcagccccagaatgcctctgggaaggagacagagcagcgcgtggcaaagcagaggcggggaggaggaggaagcgggaggcccaggtaaacctcaggccacacttgggccagaggcagggtccaaaggccggcgggaaggcagccagtcccaggaaggcagcaggcgcactgcctggggccctgccttcctcctccgggttccgcagtgtcctgcgggctaccagagaggtccacggcgggcggtggggccaggggagcctggccgaagagcagaggcccccacggcgccctgtgtgtggaaacctccggatggccgcaggggggtggggggagaaccaaagccctgggatcgccgggggaggggcgggggcttggctcgggcttgggaggaggatgatctggaggaaggcctacagcagctttccattctttcagccctgagcccccgagtctccgcctcgcatccgttcgggcgcggtgtaaactccacgcctgagctccacgagacacggcggggcggagggaggagggagagaccagtccacacacaggcgtaccttattatatagaatttgtacaatatatttcttttcgtttgcatattttacccacagcttaacatcctttttacaggctgaactcactcaggctgatagaatcaaaattctttcaaccaaataagaaaaattcaaaatcgtaaacccgtaagaaaacaaattaaaaacggtgatgaaaatacgtcactcctctcgttaggaacagtgtctgtttgtacaacaggtatgctctggaacaggatttctttacagcgtaggcacgtgtttccacctttgctctgcgggcttcgcctcctccgggcctggggctcctggaaagcgccgggacgcggcggctctggctcggcagcgccacccggtggccggagacagaggcggccgggccgagccgggagagcagccgcgggtgcgagcggactcaggcttgtttcccgtgaactgcagcgaagatcccagaacagcaagggcagtgggcggacaggtgctctggggagcccagcgtttatttacagctgatcttcctgacgggaggatggagtacagcggcggccactgccataggggaggtgactccggccctaccgcccgctttactcggagtctggggtgtggaggggcgtgggtggcgctatctcgtctaccttccaggttggctgtgagtctgagcacgcagcggggcctccctcccaagcactaagacttgtttcctgtgagtcccctcttgggaaactccttactgggaggcctcctcgggtctgagggatgaagaaggtggggccttctctggggtggtgcaggcagctcccaaagcaaggtaggtttggcaaagagcaaaagatgggaaaagggtttctacggagccagcagcacctgcctattcaggtcccaagccacaggaaccaggccaggcctttccaccagggcaatggcctcagtcctcaggccaccaagttccaggacctgccccatgtgttcccgtctcccttaaatcccaccctccacccgccccgggatggttctaccagaactctggggcttagctgagaacccaattgtagggctgtgaagcccgctgcaccttggagtcctgacccagaaggcgaaagtgctcttataggaagatgcttccagacctgcagacttgggcccttgcaatccagatccctgcagaccctgcacagagggatcttcagaggccacggggcacactgggccatggcaatgctgacctggtcaagcttggccttggtggtggggccccttctctggctctggcactgtgtggtgggacgtgcttcggcccagacactgcccctaaaggcatgctccaaccccacgggtcccactaaggccggcacgcagcccacacgccagacttgcttcatgttcccaagcgtggctctggagggagaatcatcatcggcactccagggcaagactaaacccatcaaaagaaaaatgtaaaacagcactgactagaactaatgtcgttattgctacaagtgacagccaaacagccacgcagagtcccagaggtgggtatgacagactaccatgactatcaagcagaaataaaattatgtgggtttttactcttaaaataagatatcctctgatcatcttcacggtacataagctcacgcgtgctcctcacattctgctcctttcacagaatggtcagtccccggtcatgccctcgagcccctccagggagacagtgtggttctgctctaaaaacgtgaggtggaaactgaaatatgtcaaaacaacaactgaggaactgcggctgtgctgcctggtgcatgagcagacgtacaggggcgcctgccggctgtccccaagggcacttgttctcctcaaggagttctctgggagggtgcggccgtgcagggagctagctcgatgcctggttctgtactggatgcttggggatcactggtggctaggaggggctctcgccagttttggtttggtgtgaaaagcaaagaggtgctcccaggctgggcagccactgggggtcttgctggaaaggtggatctgggtggactgtgcctccctctgaaggcaagtgcaggcagttccagctccacggagacagaaaccagttgagagaggccgcttccaagtcttcccaggcccacggctcctgcagtgacagcctctggagaaggctggtctctgaaccttcttaagggccccctgcccaccctttctgaggcattctgcactgcttggcttattttcaccatgctacagcctgtgcttgtgtccagcctacgcacgggagctcttggagacgtggctgcttggcatcctaactggagtggtcagctcaaggagagctgggcactggcgctacaggagttttcctgaatgaggttagatgtctgctctaaaatccctgtggcagatgaactagtcccatgcacgccccaccaagggctaacactccacattccagaggcgggtggccttgtttgggtagttgatggccaggctgatggcagcaatgttctgcagagcctgtagagggaaaaagagttgtcgccaatgtcgggagccactccctcattcagtgagtgctgataagaccctcagctgagcactgaggatgtggggacggaggaggggaaccagatgtgttcccctcccccacaggcctgcagagtggagagagaaaaaaaatgctattaagagcacatgaaagctccaaatgtaggtaggaatcatcactgcccagaggggcagtcccagggcggaggctcagaaggctgtctgcagaggtctgggaaaactctctggggaaaacagtgcaaagatgcaggtggggaagggcaaggcactcacaggaaacgaacagccagtgctggggaccagagggagtagagaaaacagggccaggagggcactgagatgccctggaggcgaggccaggcccgtcaggccttcagggtctgggcagcaagagggtggaggtggcagagggaggaagagggggttggcagggagacgtgtcagggagaaacgtcaggacactggtgcagtacactcaacaggctgtggggggggtcagaagagggtaaggaggaaatggagactggacaggggcagcaagagggacccgcccacaggcaagccgccatgctgagctttggggccaggacgggcaaatatcaaaatttcgttacatgatgtgatgaaacctggggtggcggcggcaatgctggtaggtagctgttgggggtaagggagtttctactctgcctacaggtctcgggtgaattcacacaaactcttcggtatgggctgggggcatttccacttccgagcgtacacgtcaaagcctacaacaggaaagaagacccttttcctgcaaaagggcggtgtgttcggagactacttccaagggacagagcgccgcgctcaggcagggctcttggctgggtgtcccggctgggtgtccacccacgggtaaccctgtgagcctcagtgtccctagctgtcctccgggggggtgggggtgttgggccacacacgcgatgatattcaaggagtccaaggttctcaaaatgtactctggggccaggcgactcccgagacccttttggggtctgcaaggttcatttttgactttccttctcctgagtatatggtggagtgttccagagcctgacgtgtgatctgactgactgcagaagcagacatgagaacatgagaatccagctgtcttctacgaggccagacatgagaggggtctgcaaggatggaacacaacagcgccaccctctgcaggcattccttttttcttttttggtcacctatttgtcccagagcactcagtaattactttgttttgaaaagttagagtcgtttttcacaagacgtgttattcatgttaacatgaaatgggttcactactttaaaaaaataaattgataaaggtttacacttttgcttaatttttaaattgaaaatctcgtttctaatggcacatatggatatatgcataatagacatatccaaaagctttctgagctcctcagtcagtgaaaagtgtgaagcgtcctgagaccaaacagctgtcagaagaggagttccgctaccagagaagcaactcacatctaaaaatatgtgaaatctaactccacggaaacttcaagaatcagccaaactaaatttaaggcatcggttgttttggttttaaagacacaaattcttctgaccccacagtttagagtgaatgactctgataaatggggctcgtgcatgctctctgagcaccaggaggaagtgactgaactggaacaagctctgtgtaagctccgggtggattctgtcctactcagacgcaatgtacagaccttctctgccctggcaatggtgagatggtggcgccccagcctgggggccagctctgttggggtggagagagtacctgtgccgcacagcggagaaggtggtcgtccgtggttagggccagcaggtaatcctgcagcacgccaagctcctgcagagagagagcaggggctgtgagtgacagcgccagatgcgcagtgcagctctcccagaccacctgggacacctgcttgcgaaagcagaagcctctcatgggcggacgctactcacgccgcccagcaccgcgtggcactgccttgctcagaaccctggcgggagccaggtgcccggtgccggggtcacctttgcctccacctgcccttgggtgaccaggccgggacccctcctcaagccagtttcctcatgtgtgaaaggagagggaagctaaagaactctgaaaggccctttcagctcccacattcaatcagtctattgtgctgaggggaggaaaaaaagagaaggaagcagaaataacccatcgttttattttccaaaactcactgttgtcaagggctgatcccgggcagtttctcccccattggctctaggcctgacaaaataagcaatctcagagctgacctgagggtttcccaggcctgggagaggcgagagcctcagactctcagccatgcctgtcctgtgtggcctgtcgagaccctggccactcaggctcggatgaggcagcagcttctgccctgggtagcagagggagcaaacgcacatggaggcaccgggctccctgcccagacctcaggcctcacctgggcacggttctcggtgacgaagaagagctcagtgagggcacgatgcaggggaaggaggatgccgggctgcgtcacgtcctcaaacaggccgtactccatgtgggtaaagagctgccacaggggcttcaacagcgcaaggtcacacaggtcactgcaggaggagccccggaggtggtcagtttactgagagccatgccaaggtcacatggcttacagctggcaggaaccacagctcagaccctccctctcccacagctggtacaaatgattataaagtcgcctcacctatgctccccacaaagcagccacgaatagtcaccaacagcaaagaaggaaaggggcagaacctaaactttaaaaccaggctccaagggaacaggaggtcggaaatgtgctcacggggattactgtgcatcttgaaaaatggatgttacgggctacacatggtggctcacacctgtaatcccagcactttgggaagcagaggtgggaggatcacttcagcccaggagttggagaccaacctgggaaataaagcgagaccctgtctctacaaaaaattaaaaacaaacaaacaaacaaaaccccaaaaaacaaacaaaaaaaaaacctagctgtgtgtgacagcacccagctactcgagaggctgaggtgggaggactgcttgagcccaggagttggaggttgcagtgagccatgagtgcaccactgtactctggcctgggcaacagagtgagaccttgtctcttaaaaaaaaaaaagttatgaagactttccagtgacagtgggaactcatctcaagataaatattaaatgaaaaaaagcaagatgtggccgggcgcggtagctcacgcctgtaatcccagcaccttgggaggccaaggcaggcggatcacgaggtcaggagttggccaggagaccagcctggccaacacagtgaaaccccgtctctactaaaaatacaaaaaattagctgagcgtggtggtgggcgcctgtaatcccagctactagggaggctgaggcagaagaattgcttgaaccctgaaggtggaggttgcagtgggctgagatcacatcactgcacttcagcccaagtgacagtgtgagattccgtctcaaaaaaaaaaagaaaaagaaaaaagaaaaaaagcaagatgtaaaactacatatacaaaataaaattcaaaaataacctgcatatacagcattttctctatgcataagaaaaacaacagtaaacagacacaacaaaagatgccaccagcagttgaccctatcagctttctaggttttctacaatgctcactgcttttataaacagaaaagaacacttaagacaagcgtggtggctcatatttatagtcctagttactcaagaggctgaggtggaaggatcacttgagcccaagagttcacagctgcagtggctatgatggtgccacactgcactctagcctgagcaacagaatgagaccccacctctaaaaaaaattaaagaaaaaaaaaaaagatggccaggagcggtggctcatacctacaatctcagcactttgggaggctaaggtggggggattgcttgatctcaggaatttgagatcatcctgggcaacatggcgaaaccccatctccataaaaaaacagaaaaattagctgggtgtggtggcgtacacctgtagtcccagctactcaggaggctgaggggaggggggtcacttcagctcgggaggtggaggcctcagtgagttgagatggtgccactgcactccagcctgggcgaaagagccagaccatgtttcaaaaaaaaaaaggtaacgatgactaccattgttatgattttcaggtgggcttatgaaacacaagatgcttgcaaggttgctcaggcagaaagcttttccctaagtaaagcagagcctctgctgagagaatgaactgaggggttttttttttgtgtgtgtgtgtgtttttactcagaggaaggctgtgttttaattccaactcaatatcctttggagaagaaaaattatgaaataaataatattctagaacttgttatatggccatatataattatataatattggattttgcttttttttaaaaaaaattgctttttctcttatgacttgaaaaattattgtgtatatttaattgttatcttgaagccaatctctttctcccagaggaataaatcttcataaaacaaacaggaaaattctgatagctttccagctgggttttcagagaagcatgagcatgtgaggtacaatgtacctgcgagctgagaaggtccctcccctgaggactgccccttgtgtgtggcctccgggccaagccctcaggcaggcccctctctcactctatgaggagcacgcatgaaagaggctagggtggcaaggcatgctgggagttccctccgggctcgggacagagggtgcgggattgtccccactggaaagaaggttgccaatggccagcagactgtgcaggctgcggcacaggtcttctttcctgctgcaggcaagaagggcccaccagccaggagaccatggagatgttccatgtttcataagcactgctcaaccagactgtgcttactggactcgacgctcaagtgaacagagctaagcccatgtggggctgagtgatcctgtctgtgtatgaggacacgggggtaacagcaagcatgcccagctctcccctctctctccacgctgcttatggactgactacacaagccatcttgttctctcccctgactttgagagtcctttgttattttaatgacagttccatattccatgagaagacaacctgttacttcaaatatcatcactgcactctggctagcattctgtgtgtctgtgtctgtgtgccttagaaatgcaggaaagaggaagaatgagctcctgacagggagggttctgagcaaggagggtgggggccaggcagacagacaacatatatggcgcagtcactaccaccttctctcacagatgaggaataaggcaattatgtctacaattcccaattcaacactatatgtcctccctatagcgcaaaaggcaagaacagtgtctaagcattgagaggaagaaataacatttgtttacagatgacacgactgtacaccaaataatctgcatatatagtcttagaatgaacaaagtaaggtcactggatataacggcaatatacaaaaattaattgtacatcagcaaaaacaaagctaaaattaaaaaataccaattatagtatcaaaaacattaaatacctagtaataaatttaacaaaatgttaagtcctctacatagaaacctctaaaatattactaagacctaaacaatagaggaatataaatagaggaatatataatggccgtggattagaggacttgatgttctaaagatcttgactctcatcaaattgatctacagtcgcaccacagcactccagcctgcgtgacagagtgagactctgtctcaaaaaaaaaaaaaaaaaatctatagaatcaagtggagatccgaatggaacaaaactgacttgatgcttaccccttctatcatacactcaaatgcattccaggcagatactcctctaagtgtgaaaggaaaaacaagttctacaagataacagggaatatcttcatgaccttcgagtaaggcaaacatttctcaaataagacaccaagaacgctagcataaagcaaatgactgaaaaactggaagacattaaagccacaaatgtcttttcatcaaagtcaccactaacagcaagaaagggccagccacagagtggggatacatatgcctggcaaagggctgccatccgggacaccgcttacctgtggccgcagcatcgcacaatcctcagaagtaagtggatggcttttaatcgttgatggccagtctggcgacaggccacgcccaccagccattcccaaatttttgccaatgggagatgaggcacgaccctttcttctgacaacatctgcttcaaaatctcgaatcctggccaacaccccaaaacacggatatataaacagagatacgtaataagtaatattattattaaataaagtataacaattgtgtacgttaagaattctacattttataaactgctcaaattttaataactgtgatcatttaaattctggctgaaattaaggcttttgtaaaaataacacaggggtcatatttccagttcctccttttttcaaaatgccctggcaaattctaagagaataagcatctttttcgggtcctgacagaatgcttctcatagctggccattcaagtttacaactagccaatgaaatcacattcaggagtgacaggtgtggggcttgtgagacaaatttggaaagtgtgagagacaagtacctgctttgattttaaccaagatcagtgacatcatggcacccacagccatggagtgtccctggcaggcagatggtgtgaacgcaaagcccagagcacacacctgtctggaaccgccccaggtgtccggccgtcacggtgaatctgtagccccactcggtgttgctcatgtcggaggtgaagcggtaatacagagtgtctcctaggcacacaaggatcagaggcccatcaggaactgaagcaacagggaatggcagcagtggtgttgggtttcaacattctccagtaagttcccttctcaatattaagtttaaacactgcctgtgaagaacctatctaatcgagtatttgtttcactacctggaagttcaaaatctttccacttctgctgagacccgctgaagctgtgtcggtcttgctggaagtcactgctgctggacatggctaactcgtcacagccctcctctgtgttgcactgagagtcgaatttgattgagaggtagatggcaccaggaatgtgaactttatcctagggaggggaaatggagaacacatctgtcgatgctgctcactagacactgactgcagctgtcccatgccgagtcctgtggctggacccgggtgtgtgagaatgagtgaaccacagccctggcctccaggagtgcagagtccagctagggcgaggagcatgcacagactgcaaatatggtgcgagggaggcacagcggggcaggcaacacggggccccagagaaagagtgtcaggctgctgtgaagagtgaagaggacaggaggaccctgttaggagaaggcgggagtgggagacaaggtggacctgagtgcatggggtgcatttcagacagggtaacagccctgtgaaggtctagcatgttcagggaatggcaaggagcttggcgtgtttggagtaaagggtgtgctacatgggcacgtatgcttgggaagcaggaacagggacaagacctgactccagagagactggcaggggcagacactgaaggccctgggcatgaaaatgaggcactcagactctggacaacagggaaaaccctggaaagctttggtgaggcttgcacagtgtagcatcactgacagctggtgtggagcaaggctgggctgaggcaaaagtgaggaaatcagaaagtagcagcaaaaggaaccccagagaagggcaacgggtgtccagggtcagtggagaagacaagacctctttgggatcgaacctggtggctgaccacatgtgcctgtatgggaccaagggagtggggctggagcccaggaacatgacaagagaagagacttggaagaaagacaggttatacttctgaaaaacaaaatctcagctggccaataacccagttctaaatcggttttcatcatccaccttcgctgctgcaggtgccttccactcagaagtagatgcctgggcaactccaacatttcagttttctctccaacatttttaaaagcgctaatgggggccaggtgaggtggctcacgcctgtaatcccagcactctgggaggccaaggcgggtggatcacctgaggtcaggagttagagaccagcctggccaatatggtgaaaccccgtctctactaaaaatacaaaaattagctgggcatggtggcaggtgcctttattcctgctactagggaggctgaggcatgagaatcacttgaattcgggaggtggaggttgcagtgagccgagatcacaccactgcactgcagcctgggcgacagagtgagactccgtctcaaaaaaaagtgctaaagggactacatggccttaagtcaatgagaataacggaggctgccccattcctgcctcatcaaaatgcctacctccctgcccaggcacaaagttaaggatggaaaagatgagactctgattcagttctgggaaattttaaaaaggggctgtagtatccacggtgggggcaggtcatgaggtggcagctgaagagtgagggtccaacctggaccacattcagactcactgtctcactgtgaagccaaggactcactctgaggagcctgccgcagggaaagtaaagctctcctccagggctaggtggcccattttcttctattaaaacaagaaaagtccggagaagagaagacttgcttgtacagaatccctggcctcagggaggcagactgcagtttgttcaaggaagcactttcctggacaggtctctgctgtccagcgggagagagccacagaggggctgagcatggaggggctgagcacggaggggctgacgaggtctctgcggctcagtcgctcttatggggcctgccggccccaggcttacctcgaagttggtgttgttgttatacgggtgtttcgactccctcacttgcacctccattcctggctcctccatgaactggcatgcagccagggccatggtccccagcatgtcctctcggcagccctggagcactttctgcaggatctggtgggaagcagacagataaggtcagggcctgcaagtggcatcaggaagaagggacagtttacttcaacccaagctccacccaaaggtgctggcatcatcttagacctaggacgagcctctgtgactccaccacccaaaaccaactccaccagccacctctcacttgaccaggctcttggtgtcaatcaggacactgcagtcctttcagaatgatgctacttagaggtggtctgaaagaactaactgaaccaatcataaagggtcctggtccttgaaggagtccccagccaagcaggtggattggcctatggataaataatgaccacacaatgtaatcgatgcctggagtgaggtgcagggttgggagctctaggtggcaagaactgtgggaggacacgcctatgcaagggcctagtagaggcagggtggctccctctgtcccttccgaaagatagatatgctagagcaagcctgccagcacctgcagggctgcaaggccgggaaaagacctcgaggtctggtggtgttctcagatggacaaagcaaggctgagaggccaaatgaacttcctcatggactgcgtgtgtgtgtgtgaaggtgggtgagggacaggatcaaaaaggagctaccgaatgtgcctcaagatttctgcacttggaaactgggaagatggcgacaaagctttctggttcagctggaaatcgcgctcagggcccctgagttcctcactagcccaatccttgggagaggatacagtgaccctacctttgctgcattcacacctgtcagggagctgcacagccacacaggtagcctcgctccaggaagcactcactggaggaagcctgtggggcagaggaagaacctggtgggtgagcacaagctcagtctgcataactaccttctcccactcatgcttttcttccagctgcatgaacatatccaaaatgtaggtcatatgggcagggccactgagctccaggatgtcctcgctcactggcacgtggctaggccactcggcgagcagggatgcaagcacgtggcgggcgtacaggacagctgtggcctcgttcactcggaagaggtagtcccggacagccctcttactcttgcagttcagctccttgtgcaggagggcggcgctcttgctacggcgctgcttggcatagctctgctgcagttcgctctctgtgctggagatcagcttctgggtcacagggttcgattcagcagtggcttggtcacagcgtgcaggccgggactgcaaacccaagaccaccattacagaggtctagccttcttacagtggtggtatggggtgggggatggggtgcagatactttgggtccgaggtcgggtgacataccaagcatggcaggataatcatgtctgtatccacagctttggcgctctgttcttccagcctcagactcttactgggctgccaccgctgagccagggaccgtatcctttcatctgtggtgagctcatcaccatcaaacctgcagaagggcagcacaaagttgagtaccaacagtgtagacaggccagttttaacctgcacttaaacttgttggcaatgttcttcagagttgttcttctgttagtatcaatgacattatcatattccgtgttttgccaactggattcacagccttcacttatgcatggatacagaatgcatgtatgctctgtggcaggagatgcaaactctcctgcaaaatccattctccttttctatcttttccatttttaaaattaatttaaatgttttattttcattaaaaaaacatttttaaaaaaaatttatttgttttttttagagatgacgtgttggagctatgttgcccgggccggcctggaactcctgggctcaagcgatcctcctgcctgcctcagcctccctagtagctgcgattacaggctcataccaccatgcctggactccccttctctccttttttttttaaatttaacagagtttaaatgagcaaagagtgatccccgaattgggcagctcctgaatcagaatgggttcagagtgactccactgctgtggttggaggtttacgaacagaaaaaggaaactgacacacagaaaacagaagtgaggtacagaaacagctggaatggttacagcctggtgtttgccttatttgaacgcagtctgaacaggtggacgactctggccgaaactcggtggcccttctctctctctaaagctccctgagttttagcaagagccacagtcacccagctagagacatggttagcagctagatgtgctgatgcccctgggttctgggcagtgcaggtgagcgaggtggtgtgccacctctggagtctactggactaatggtgcactcccttctccacctcccctctttcctctgggctagaaccgagaggtggggtggccgagggagctttcactccacaaatgagaacgctgggattgctgggtccctctgtggagcagagctgtcacccaccccagactctgcctacctctggactgttatgtgagagaaaaacaaattctatctgccctgatccattatatttctggtttcttagttaccgcagcttagactgtaccctaactaatgcaaccctgcttcacctcataaaggcttttaggcaatatataagaaactaataaaagagaaacacgaaacacaaaataaaagaaaaattaaatgagaatttacaatgagtaagaagtcaaaattaggatacgggggatggaggagactggattgcagatatgtaaagttctacgcaaattaaaaagttgggcccaaaaactagctctgaacttcctggccaagagaaagggaatgttcttaattttaaaaatatcttgagcagaagttcctgctctgtgctgtctgctccctgggattacacatgagagacatcttggtgcctgcccaatttctgtgtctgtaaaatgagtttcctctcagaggccgactacaaacataagttttaaagaggaaccacagtgcactttgaagatgatccaggtaacgtagcacaggccacctcccacctcgccttacaaaggactagcaactgcttcccggcctgtcggagcgtcgatcgatccagaagctgctgccaggaggcgcacaccctcccgccctcacatattctctccctggccacacttcagctgcacggaaatgtcccttacctcttctgaacctccaggaagaaataatcggtctttttcatctgcagttcgtatatggcccggagaatgtgcagaggggcattgagggcatcatgagccatctggaggccaggggaggacgcagacaagaaccattaacagtgcttcaatacggtattgatcaactgaactcaaaactgagaagacaatatagcaaaagctgccacaggttataattgaggaacattatatgggtagtttaaaaagcatataaaattgtaagcaccaaaacatggactataacacctacactacgactgtaacttcaaaggaaattataaaacactaaaaccccaaagaaatatcctgtcaacaaaatacaatgctgacagtagatacttaccacatcgtattcacggctagcgtctctataactgttttacactcaagtttgacaactagcgcatacataggcactgtattttcttttgattttttttgacacagggtctcacttggttgcccaggctggagtgcagtggtgtgatcatagctcataccactgagtacccaaaagcgtagaaaggcaagaggagttttaacctgcacttaaacttgtcagcaatgttgatcaaagtagtttttctgttagtatcaatgacatcatcattttctgtattttgccaactggattcatagcttttacttattcatggatacagaattgcatgtatgctctgtgccaggggatgcaaactctcctgcaaaatctgtaaacttgaactcctggcctcaagtgatcctcctgcctcagcctcctgggtagccaggactacaggcgcatgccacacctggctagtcttattttttgtagaggcagggtcttgctaagttacccagggtggtcttgaactcctggcctcaagtgatcctcctgcctcagcctcccaaagtgctgggattactagtgtgagccactgtgcctggctgggatttgctttttctgacattctacgctacattctgtttactcttcatttagtcacaacttctgaagtccaagccctcatccttttcatattgttctgaggaagaatagattacctagtaaaggtaagagtgtatttctgagaaactatgaggaaggaactatcgtatagagttcatggacgagccttagggctttagtaagcccttgaaattcgtgcaaaattttacatacatgtttgaatgtgtattttatggggagagaggacctaaagcttttgagtttataacccaaaatattaagaactattgttgtggggcttttctgttcttctggatcaattctgcacaacataagactgagtctttaggaagtgaattctcaggacagcagacagaagcattttcatgtttaggctaaaacatggcccgggccaaagagaagccatccctcagaagcccctcctaagccacaagatgactcaagaacacaccaagaaacatattctggtgggctcatccaggccctcaagggggtccagctttttctgctctgggtcgccagggctgctgactggccgttccacctcttcctctcggtcccctcgctcatccagctctaggtctccgtgctcagccaaagcgttgatctccttttttgaggagtacagcatgatggacaaaatctacacagaaagaaaatccagctgaatgtgagcactcagtgggcgggaagatggtacagtcctttaatcatgaaaatattgggcctaactttttaagacatcagaatctacctgaagaatgtgaaattagaaaagaaacacgaatgtatgtttaattacactttgtgaccgaagaaatactaactgaacactatgggaacctttgtgtttattcacttccccacagatggtatcaactgctatcgtcctttttagaacttcttttggcaaaatgtaaagagccagggaaatgctcatatgctttcacccagcaactcatctgttacgaataatgtaaaatatacaaagttattttcataatatgctcagtgaagcactaataccaaaaaaactgaaagccaccttcatgtatgatatgtagccataacaaatattatgaaaactacatcagaacctagaaagcagcccacatgccatcaatttatttgaatacgatgctcatgatgcagtctagatttacacatgcaacgcaaaatgcatagaaacaaaacgagaaggagaaaatacacaaaacgctaatggcagctgtgtttggaatatagagtttggagggtttttttttttcttttataaagttttctgcaatatagttctaataataaaaaattttaatttaaaatattctctaagaataaaagttcaaatactctccaaattatccattaatatgttgtagcacattttccttaaacctaaccaaatcctcttctggcaattgagagctgtttctgcaggttccagcctctgctgggctgtgaatggccgctcactccctcctatgtggcggcagcctttcctgggcctgaatggccgctcactccctcctacatgatggcagcctttcctgggccgaaagttggcactgggcacagaaagtccacagggaaccacagtagttccgctaagaaaactctaaggtctacggggaacagtaataaaattataatgatcaactaaaatcctacgtacaaataaacataagtgaggacaaatttagagactgattttggctgaaagcaactttaaagggaaatatgaattcaagggtatactttattaccatgatataatggttaatcatgtgtttccataaaatgcttctcttccactgttctttgaacaaacattaaattcattttccctgacaggggtagacaggtgtcataatccctatttccaacagggaatacagaagcaagggagttttcaacactgtactaaaggagtgtgcacagggcagaagcagctggaactcggtgatgcttctaactcctaggccagcacatctgcaccaggaaagaggagcaggagtccctctcgtctcttacttccaggtcccggaggagccacgttttactaaagccagtccctttgctgcactttttcaccagcaacttcagcaaatcggtctgaaggaaagtagcacggatctcctcaaaaccgtgagcctgccaagcagaagaagaatgatgtgtgactgccttggagtgaagaaggtacaaccttagctgtaactcagtctgttcattcactctttcattcattcgtccattcaacacatacttttgaatgaagcctattttatgtcacactcccctgctctaacttccaaaagctgtctggggctctttaggctaaaatccaagcctctgatcatggctgacaaagacctacaaggtccctgcctgcttctccggctgcgccccacctttcctgcattattctaaagcctgggaggtgttctttctgctccttgaccaccacgcttgttccattttgaggcctggagcttgctactcactccgcgtgtaatgctctgtccagttttcccaaagctgactccttatctatcggttcaaattttactagagaaaaaggctttttttgacccacagcagtttttctcgcaggccccctgttgtctctcttgccggtcagaccacaagctccaggagagcagggaccttctttctggctccaacactacatactcagttccatctggcccttggtgctcaacaaatatttgctgaatgaaggattcaaagacagaaattattgctgcccttagggagtttattttccctttcctactatgatgtaaacaatggaaacagtagcacattgtgataaacgtcatgaactaaagaaacagcaggctgggcaccatggctcatgcctgtaaccccagcacttcaagaggcggaggtggaaggatggctcaaggtcaagagttcaagagcagcctgggaaacttagcaagaccctgtctctccaaaaaaaaaaaaaaaaaaaaaattaactgggcatgatagtgcatgcctgtggttagtcccagctacttgggaggctgaggcaagaggaccccttaaaccaaagcatttgaggctgcagtgagccgtgatcacaggtctatactccagcctgggcaacagagcgagaccctgtctcaaacaaagaaatgccagagaaaacccacaaacaaacaaaccaaccaacaaaagaaacagcagatgaatggtctcaattctacaactacaaactcccagggctggatcagagctgaaatgccactgaggccagctgctgtggtgttgagtgccctccatgacctccctatcagtgcttccaccgaacagccttcaactgagctcctcctttcatggatatcctctgttgggaagattatcctaaaagggagctgacatatgtttccttgaaaaatcattcctcccaatcgctgcctctcaggtatgggaaattctcataagtcagctgctcatctccatgccaaatattgcccaggttttttttttttttttttttttttttttacagagggagtcttgctctgttacccaggctggagtgcaatggcatgatctaggctcactacaacctctgcctcccgggttcaagtgattctcatgcctcagcctcccgagtagctgggattacaggcacgtaccaccacacctggctaattttctgtatttttagtagagatggagttttgccatgttgcccaggctggtcttgaactcctgagctcaggcaatccacctgccttggcctcccaaagtgccaggattactgctgtgagccactgtgcctggccatcgcccagcttttcaacttgtctacctccttccactccaactgtcaaacctgttgctcatcccctaggaggctagctccctctattcttcccttcatcttctatgatgaagcacaggaattgtcatttagagaggaaagtaagaaacttttcaatttttcttctcgtctgacaaagttgtgttcccatgaagtagtagtatcagattccttgaaacaatggaaagacagagaagccatcaggaaaattgtatttcctctttgaagttatctgtgtgtaaggcccacgcgtttctaaaaataatcaagatcctatggtttaccatccatcgaaatcagatggcatttcctcctagttaatccccatgcagatgtcaaattatagccagatccactgccaactggagaagctccccattacctttagtgttttatacaatcctttcagggccagggacaggacccaagttgcttctactgcctcgggacaatggctgtccatgctgctttgcagaaggtgactggcgataaaggcaaagtgctgggagtactggctcagctgggcccgagagtcaccacactcttgtcctcctcccttctggaccagctggtagtccttcactgaagggtgacatcaggcagaaaaagaaaggcacaaaagtacagttcatgcttccagcagctatttcttctatagtaacatgccttactaaagtagggactgcagaaacataaatctctcgggctcagtcttagccaataaagccagcttgcaggtaaacacaaaaatagtaatggctacctatccatcaagcaactgagtgggacaatttgcattcttactattgtgcataagcaggccatctccacaggtgttaacaaaagttcttaaagatagcatatatgaggccggacgtggtggctcatgcctgtaatcccagcactttgggaggccaaggtgggtggatcacttgaggtcaggagttcaaggctagcttggtcaacatggcaaaaccccgtctaataatacaaaaattagctaggtgtggtgtcacacgcttgtgatcccagctactcaggaggctgaggcaggagaatcacttgaacccaggaggtggaggctgcggtgagccaagatcatgccattgcattccagcctgggtgacagagtcagactccgtctcaaaaaaaaaaaaaaaaattagtacacatgagatttccatttccaaacaagacagaacaagagagactggatttactctcccaccttaaacaaccaggacactgaaaaaacatgaaacaatagcttgcagatattgggcaaaaggtagtataggactatgatccctgagagaagggatataaactagatccgccctccaatagcaccagctatctgcagacgatttccaagctgcaaagtgggaagcaaacatccaggcagaatccagcagtctcaatgaattaaagaaacagagatcagagttcagggaggtcaaggctgctagaatgtacagggcagaatatcagagcagggagatgcagagagagaggggtgggttggggagagctctccggagatccacagagtcactcacgagtctgtggctgcatactgacctgcacatttctgtgaaaggaaactatctggggcagaagaaagagctacagtagacagaacaattcctggagctcacagagagctgggaatactttgtctttccaacagtgagagtggaagtgtcctagtggagatgggggtgggggcagaaaaaatatttgaatacataatggtcaaaaattttccaaatttgatgaaaactgtaaatctaaggagctcaataaatacctaagcagaagaaacataaagaaaatcatgtcaaggcacatgcataattgaattgctaaaaatatagccagaggaaaaagagacattacaaaaatgtagcaaaagaagaatgacagcagacttcatcccagaatctacacaagccagaagacaatagacaaacatcttttttttttcttttttttttttttgagacggagtttttgctcttgtcacccaggctggagtacaatgacgtgatcttggctgactgcaacctccacctcccaggttcaagtgattctcctgccttggcctcccaactagctgggattacaggtgtccaccacacgcccagatatttttgtatttttagtagagacggggttttaccatgctggccaggctggtctcaaactcctgacctcaggttatcggcctgcctcagcctcccaaagtgctgggattacaggtgtgagccaccacacccagcctttaaagtatttaagtacatctttaaagtatttgctaagataaaactcagcttagaattttttacctggcaaaattatctttcaaagatgaagtaaaaaaaagtcccccagacaaactgagagattatgtcacggcagacctgcactataaataatgttcagcgcagtttttcacgtccccccacaaaactaaaaaagatcccagatggaaaactgaatctttacaaaggaatgaagagcactagcaatgaaaaatagatagctaaatataaaagctaatgttttctcattttaaaatctcttgaaatctctctctctcttgttttttagggggtggtagaagacagggtcttgctgtgttgcccaggctggcactgaattcctggcttcaagctttgtgatcctgtcttgcctcccaaagtgctgagattacaggtataagacctacgcacccagcaatatctcacttttttttttttttttttttttttttgagagaagtctcgctcttgttccccaggctagagtgcaatggcacaatcttggctcactgcaacctccgcctccctggttcaagtgattatcctgcctcagcctccctagcagttgggattacaggcgcacaccaccacgtgtggctaatttttgtatttttagtagagacggggtttcaccatgttggccaggctagtctcaaactcctgacctcaagtgatcagcccgcctcggcctcccaaagtgctgggattacaggcatgagccactgtgccctgccttttttttttttttttttttaaagagacaggctcctgctctgtcacctaggctacagtgcagtggcatgatcatagctcactgcagccttgatctcctcggctcaagtgatcctcctgcctctgcatccacagcagctgggattacaggtgtgtgtcaccacacctggctttctaaaaaattatttttagtagagatggggtctagctatgctgcccaggctggccccaaactcctggcctcatcatcatttatttatttatttttgtagagatagaattttgctatgttgcccaggttgatctcaaactcctatcctccagtcatcttcccacctcactcagcctctcagagtgctgggttattttgtttttcttaatgatttcattttatttccactattggctctttatctttttgggttttgttgtggttgctctaggatttacagtagtgtaccttcaaataatttcttaaatgttgttctagggtttacactgaacgcctttaacttatcatagtctaccttcagataatagtataccatttcacatatagtgtcagaacattacaacattttccactccattctttgtgctgttacacattttacttctatatgacataaatctcacaatacattacatttttttgcttcaaaaagtgagatactggccaggcatggtggttcacacctgtaatcccagcaatttgggaggccaaggcaggcgaatcacctgactcaggagttcaagaccagcctggccaacatgacaaaaccctatctctactaaaaatacaaaaattagctggatgtagtggcagatgcctgtaatcccagctacttgggaggctgaggcaggagaactgcttgaaccctgggaggtggaggttgcagtgagccgagatcacaccactgcactccagcctgggtgatggagtaagactctgtctccaaaaaaaaaaaaaaaaatcctaaattcaaccatcttgataactgcaataaatgtaaatggtctaaacacatcaattaaaagacagggattatcagattggattttttaaaaaaagacaagaaatccactttaaatgtaaagacacaggtaggttaaagtgaaaagatgtgaaacccatggatatgaagggccaagagtatttttgatttgagtttggctgagcctctggatgcaaaacccacagatatgaacagccaactataagggactaatccacgaattttgctatctgtggggagtcctggaaccaatcctctgaggatactaaaggatgactactctatgcaaatgctatttttaaaaatgcaagagaggctgtacgaatattagatttcagaatgaggaatatcattagggataaaaaagggacatttcataagaaaaagagaaacatacaattacagttagaaacttctatagtcctctctcaggaattgttagaacaagtagataaaacatcagtaagggcacagaagacttgaataacattatccattgacttgacctaattaacatctataggatactccaccaacaacatagtgcacatgcattctcttcaagtgtacatggaaactccatgaaaacagacctaattttggacaataaaacaaattgtaataatattcataataggactgaactaattaaaaatatgctctatgaccacaagggaattaaacctgaaatcaacaaccaaatgatatctggaatatcccccaaatattaagaaactaaacatcaaacttttaaataatccacagagcaaagaaaaaaaaaatcacaagataaattggaaaatatattgtgacctaaatgaaaatgacaatatatcataaaaaaaaattgtgagatgttcctactgaatccaagggacaccgaaaaagaaaaaaaaaatagtggatgtggctaaagtcatacttaaaaggaaatgcacaacattaaaattcttctattgccaaggaagaaaggtctcaaatcagtgatggctcctaccttaagaaacctgtaatcccagcactttggaaggctgaggcgggtggatcactgaggtcaggagttcgagaccagcctgaccaacatggtaaaccctgtctctactaaaaatacaaaaattagccgggcatagtggcatgtgcctgtaatctcagctactcaggaggctgaggcaggagaatcacttgaacccaggaggtggaggttgcattgagctgagatcatgccaatgcactccagcctgggcaacaagagcaaaactccatctcaaaaaaaaaaaaaaaaaaaaagacagaaaccagaaaagcagccaggtgtggtaactcatgcctgttatcccagcactttgggaggctaaggcaggaggatcacctgagcccagcagtttgagatcaacctgggcaacatgctgagatcctattaaaaaaaaaaaaaaagaaaagaaaagaaaccggaaaagcagtaacaacacattaaacacaaagccagaagaaataaggaaatttatctgggcagtaatcaaagaaacagcaaacagaaataaaagaaaaatgaatgataccaaagttggtcctttgaaaagatcaaataacttgacagatctctggctagactatctaggaaacaaaaagagaagacataaattgccacaatcagaaaataagagaagacggctcataccccaatatgccaggctgagagaaattaaagaaacctaaatttattctctaaataaactgaatgatgtaccatgcactcaatatagaagtccctgacttacaatggttcaacgtaatgatttttcaacctttataatgggtttatcaggacataaccccattataaactgaggaacatctgtctggttaaggtattgtcccaaattaatctatagatttgatgcaatgccaatcaaaatcccagaaggccatatacttttctgagacagggtcttgctctgttgcccaggctatagtggagatcacagctcactgcaggtgatcctcccacatcagcctcccaggtagctgggactacagcatgccaccacgcctggctacttattttatgtagtgatgggggtctctacaaagtgctgggatttcaggtgtaagcgactgcgcctggctcctgcaggctcttttatagaaactgatagaaactcttttatagaagctgattctaaaacttacacaaaaagacaaagaaactagaagagtcaaaacaattctgaaaaagagcaaagctgaaagacctgatttcaaaattttatacaaatttaaaatagtctggccagatgtggttgctcatgcctgtaatcccagcactttgggaggctgagacaggtggatcacttgaggtcgggagtttgagaccagcctggccagcatggtgaaaccccatctctactaaaaatacaaacgttaggctgggcgcagtggctcatgcatgtaatcccagcactttgggaggccaaggcaggcagatcacctgaggtcaggagtttgagaccagcctggccaatagggtaaaatctcatctctactaaaaatacaaaaaattagccaagtgtggtggtacgtgcctgtaatcccaactacttggaaggctgaggcagaagaatcgctggaacccaggaggcggaggttgcagtgagctgagatcgtgtcaccgcactccagcctgggcaacagagtgagacttggtctcaaaaataaataaataaataaataaataaataaataaatttacaatagtaaaaaaagtgtagtactgaagtaaggacatatagattaatgaaacataatagaatccataaatagacagatacatgtgtgtcaattttcgacaagattccaagataattggatggagaaaggatggcctgttcaacaaatggtcctggatcaaatggatgttcatacgcaaaagaaaagatcttagacatttacatacacgaaaacagcacagacactgcctaatgctgatgctgagtgaaaatgcagatggcttcacgagcagaactgggaatgtaatgggtagatactccagattgcctgggccttggcaaactaagtcaaaagggcatttgtgatataatactttcaatgttatactgataaaacaaaatggaaagttacatgaattctaatacaattattttaagtgcagccacctgactccatgtagtcacctgactccaaaatatgtttaaattacccatagaaagcaaatgacaccagcaaatggagaaattaaatgttcagaacctatatatctagccaaccaaaaaacacagagccatatacacaaaaagacagcatggaaaggggcctttgaaattatcccaattcaatacatcatttcagaaataaggaaaaagaagctcggggagctataacttgttctttaaaaaaatcacacgcaggccaagagccaaggtaatttcattgattttagggtacggagggattaggcatttttcttccattcttagaaaaaaataattacgcatggtacctgttttcctcttccgagttttgacatcaacaatcacagccctgttcttctcagtaaagtgcttcaagatgatcacattatggggttcattggcattatccatataaacgcagcgggttcccacacagaggacctagaacgtggtagacagagacagaaaggcaactcaaacatggagacaagaaagaattcttaggcataagcccagccccctttgattgtgcctctgatttcaacaagcacgcaaggatagggatcttctcatctctaagtccaaagagtctgccacaggctggcacagaattggtttaagtccttgctggatgaggccatgtttttacagccccctttgtcctaatcagttgagggacatgaagattagaaataaggtcaaggtgaatgccaaaatgaaagacaattttctttgaagttctttgtaatctgatatattacagtcacctattattcaaagccaactactggctataaatgaatcaaatgtttaaccgttaaaaatgcaagttgaataaaccatcccataatcttgacaatacttcaatactacaaaagcaaggtgtacaggcaaaggaaaaagcttccaaagagatctatgcctatatatccggaagccacagaggctttggtgtgtatagtgaagactggaaggggtgaccaggccctcaggccttcagagtgtggtacctgggggaagccaaccagcacgagcagggtgaagatgttggtgtgcttcagctggaatggcagctgcttgatgcagtggtctgtgaaggtggcaatgacatcacgccacagtggggcactgttgagtgaccgcaggatctctgccatggagcacgcccagtccaagcccacccggctggaaggcaagagctccattaggggcagtacacagggctccaaactcaactcgttagagctcactacactccaaggcagacccagaagccttcaaagagccattcattaactagcttaaaaactaccagaataatgcttttcgtataatggtgagtaaaagagcaaacaaaatcaagacttgttacttacatactcaccctacggctgtgtttccaaaaatatctataaaaatcacctgtgtgtgtgcacatgcacactcatattcaaacacagaagaaaatgtagtgagacagcaccagatgtattaaaatggtgcaagtcagggtgacttttttccttcttttattattattatttttttgagacggagtcttgctctgtcgtccaggctggggtgtaatggcgcgatctctgctgaccgtaacctccgcctcctgagttcaagtgattctcctgcctcagcttccggagtagctgggattacaggcacacgccaccatgtccggctaattttctttgtatttttagtagagacagggtttcactatgttggccaggctggtctcgaactcctgacctcgtgatccaccagcctcagcctcccaaagtgctgggattacagatgtgagccaccgtgcccagcttattccttcatttctgttttccaaatttggtgttgtggttatgttacttttacaacgaaaacagatttatttgcttcaacctcaaggcccacacttaccgctcattaaaaacagaatatgcctcattagagagttgaatcagcagccagtgtcgagactgctcagctgttttaacgttggtgttaagcacagttttaatgtgggttgacagcattgctcatgaacctaattctatttccacaaaactctcagacaacacaactgtagcacaccgaaattaatcaacagccagaccttcaacttaaacaaataaacaccaaggtgggatagagggcaggtggttagaggagcgaggaccaaggctacctgtccagacacacagctcccaggctaaagagcaggtgggtggttttccagccatctggcacaatggaactgtcccctgcagcaaacaggttgtgtttggctgagaggactttgatcactgcggcgtctacctctgctggcaaaagacggataattaactggccgagaagacccagggtgagatggtaggtttcattcaggtggcctgcgtttgagatgacaacctgaaacatgagtggaaggacgtgctccaggtctatcaggggaaccgtggggccctgccaagagagggagagaaatctgttcagtacaaaatccacataaccaaacttgctaaatattatatctccctcctaccttatttacagctggcctagtgctaacggaatcatgcttgtagctttcataaatgccatatgtataatcacttacaaaataaacatcctcagctctcatcttacaatcctacttctaatatttctttaccctgaaaaagaaacttaaaatacttggtttccccctcacctttcaaaatgtccattgtaaaataatttaaataattcagaaacacgcaaaagttaaagctcccctaaatcccctccctgcaaccatggccaggagataacaactgttaagtgtgatgaatagtctttcaacctttttctatgcatatttatttacacatgatatatgtaaaataggccaggcatagtgactcacacctgtaatcccagcactctgggaggccaaggcgggagagtcactcaagcccaggagttcaagaccagcctgggcaacatagtgagaccctgtatctacaaaaaatacaaaaaattagccaggcatagtggtacgtgcctgtagtcccagctacttgggaggctgaggtgagaggattgcttgagcccaggaggtggaggctgcagtgagccatggtcatgccaactgcactcctgcctgggtgacagagtgagactccgtctcaaaaaacaaacaacatgtctgtgtgtgtatatatatatatttgtgtatgtatgtatatgtaaaataaatttaaaattttaaatagttgtttttctttctttaaatagtgtcttgcaacttattaatactttgtttccagttcttcattattataaaaaccattcagctaaacggcctggtacaaacatttctatacttataccatttgttattttccacaggaaaaaaatgcacaaaaccgaagaaagcttttacaatgtctgagttgttatcctcagtgtgactcaagagggcactatatccatagtatgaaaacaaagcaatcaaagaacaaaaagttcttggaaataaaaagtgattctcaagaaggcgtctttctgacatggcagcctgggaggggtgtcacagtccaagaactcagaaggcatctaggcagggggttggtctggtggaggccacatggtgtcagaacccaagcagggtatggaatttccatggagaaggtctggcagaggagtcagagcacaggtggctgaggaagtcacccaagcccaggaatgcccaggcctctggagttggagcttgggctccgagtgaggtgaggagggcaaaaacgcagaagagcagcctgatgtgagtgtccgaacctaagtggagaggtgagggcatctgcgcggggagttcaccctcacacaggggctcagagtccaaacagcataaggagagtgttgccactgagtagcagcctgttgcgggtgagggtcgtctcactgcaagggggcaacctggattagagagacagacccaagtgtggtggggaggtatccatgtcaagagtccactgtaatcccagcactttgggaggccaaggcagggggattacctgaggtcaggagttcaaggccagcctggccaacatggtgaaaccctgtccctactaaacatataaaaattagccgggtgtagtggttggcgcctgtaattccagctactcaggaggctgagacaggagaatcgcttgaaccggggaggcagaggttgcagtgagccgagattgcaccactgcactacagcctgtccaaaaaaaaaaaaaaaaagagtcgaaacaaggaaaggaggacacctcaaaagaagaacagcagcagagatgtgagactgatccagtaggtaattatacgaaggatgatgggatccaggattctcaccgttaaagactggattctttaaatcagggtttctcaacctcagtgctactgaaatttaggtctgataattctcatgtgtgtgtggggtaagtggcacctgtgcatttaaaaatgtttaccagcaattcctatagtgtagactccgctagaattccaggagcattccctgagttgtgacagtcaaaaatgtctcaaggcactgtcaaatagccatattggataccttcagtttgagaatcactgctctaaggccgggcgcggtggctcacgcctgtaatcccagcactttgggaggccgaggtgggtggatcacctgaggtcaggagttcaagaccagcctgaccaacatggtgaaacctcatctctactaatacaaaaattagccaggcgtggtggcacgtgcctgtaatcccagctactaggaaggctgaggcaggagaatcacttgaaccgggaggcggaggttgcagtgagcagagattgcaccactgcacaccagcctgggcgacaagagggaaactccatcttcaaaaaaaaaaaagagaatcactgctctaaataaatatatagaatacacacacacacacacacacacacacacacacacacacacactctctctctctctctctctctctctccccgcaccccgcccgcccgcactgggaagactggggagcagtgacaccctgttagcaatgaacccacctagtgctcaagccatttcaacatactatcctctaccaaaaggaatgaggtcaccttagagaaatggctgattctagggctaggggagggagaatttaagaagtgctgaaatgatggggatatgtcaaaaggacacagaagtcagcgggaatgggttcccactggtcaaaataagtaatcagaataatggattatagctcatggagtaaaacaggaaatcatgaacccatactgatataactaactaaataaataaattgtttgatgagaaacaggatatttacatagtttcaaagactctccccactaaatatttactaataacaaaagtggaaagattatggtagaaaaggctaatggacaccacttaatccagtgatcaaagtaaacatgatcagtaatgaaatacgtcaaaactgtgttccacctgacaggctgcaatgagaatgcagcatctcatctgtgattttcctgcccaagaggcaaagcctgaatctaattatgaggagacatctgataaactccaaccccaaagaggaggacattccacacaataggtggcctgtgatcttcaaaagctcatgatcacgaaagtaaagactgataactgttaaagactagaggtgattaaaagacatgacaacaaactgctacacgttcattctttttctttttcttttctttttttaagagacagagtcttaccctattgcccaaactggaatgcagaggtgcaaccttggctccctatgacttcgacctcctgggctcgagtgatcctcctgcctcagcctcccaagtagctgagactataggtgtgtgccaccatgcctggttaatttttctatttttttgtagatagagtcttgctatgtttcccaggctggtctcgaactcctgggttcaagcaaccctcctacttggtctcccaaagtgctgggattacagattcaaggcactgtgcctggcctatacattaattctgatcctcctgccataaaagacacttttggagcaaactagtgaaacttgagtagggagtaagcattagatggcagcaatgtactgatgttaatttctctgactttgatgactgctgtctggttacacaggagaatctccttgtttgtagaaaacacacactaacatatttagaagtaatatggcatgaacttggcaactttcaggcataaaattatttgtatagtacttttaacttttacataagtttgtaattatttctaaatttgagaggatatggagcaaataaagctttcatgtgctgccgtgggagtgtgaaccggtacaaacattgcagaaactgtttggcagggagtgtgaactggtacaaacaacggcagaaactgtttggcaggccaagtttggcctgcattcagatgctcatcaaaagccacagacaggtgtgctcatagtattgtctggagtaatttccagtttagaaacacttaacaatagtaacgtgaactttaaaattatggcatattcatataatggaattctggataacagtgaaaatgaataaaggaaactaatcacaataacatggatgcatctcacaaacataatgttgagcagaagaagccagacacaggccgggcgcagcggctcacgcctgtcattccagcactttgggaggccgaggtgggtggatcactggaggccaggagttcaagaccagcctggccaacatggtgaaaccccggctctactcaaaatataaaaattagctgggtgtggtggcacattcctgtagtcccagctacttgggaggctgaggcacgagaaatcacttgaacccgggaggcagaggctgcagtgagccgagattgctccactgcactccagcctgggcaacagagcaagactctgtctcaaaaaacaaacaaacaaacaaacaaacaaacaaaaaaccaccaccaccaggcaagaggaatgcagcgacttactccagctatacaaagtttcaaaacaagcaaaactaacctatggtgacagaggtctttttattactgggttgtaagagttctttatatattccttataggactctatctaggcagtttttacactaaaatcaaactaataatttgccctccaaagtgcctgctaaaaaaaaaagattattaggggaaaataacctcagtggtgattttaaaaagtcaacttaatgaaatctctcagaacaagagataaacatgaaaaatacaaccaaactgaagaaaagatggagggtagattcaaggggtccatcctggccaggcgcagtggctcacgcctgtaatcccagcactttgggaggctgaggtgggcagactgcttgagatcggcagttctagaccagcctgtccaacacagtgaaaccccatctctactaaaaaaacacaaaaatcagctgggcatggtggcatgcgcctgtaatcccagctactcggggggctgaggcacaaggatcgcttgaacccaggaggtggaggttgcagtgagctgaaatcgcaccactgaactccagcctgggggacagagtgagacaccatctcaaacaaacaaacaaacaaacaaacaaatccgccctgcatccaggagatgcaaatggggcagacacagaagcaaagccaaacaatggcagaaaggcatttccttagctgaagtaaaaatggagtttttaatcagaaaagcaaatgatgctgggaaggcacatagaaagagaacttttttttttttttttttttgagacagagtctcactctgtcgcccaggctggagtgcagtggcacaatctcggctcactgcaacctccgcctcccgggttcacgccattctcctgcctcagcctcccgagtagctgggactacaggcgcccgccaccacgcctggctaatttttttgtatttttagttgagatggggtttcactgtgttagccaggatggtctcgatctcctgacctcatgatctgcccgccttggcctcccaaagtgctgggattacaggcgtgagccaccgtgcccagccgagaacatctttttaaaaattattttacaaaatctttctcacagagataatatttattttgacacggtctaatgaaacgtctgaattccaagggttaaaaaaagaaaatatttaggcaaaaaaaatcagttgatatcatgttaatactggacttctcatcggttgttctagatggtggaagactatgcagcaatgtcacaggggtccggatgaaaaggactgtgtccctgtaattccacacccagactgtctcccatctttacctgtagcctttcctcaaaaagtacttgaggaagtattctagcgcaacaaaaaatgaattagagtaaataattcagaaggaagaaatagtaactaataaataacatgcagccaacacactgtaactatcaatcattaattaccatatggtctaaaattctaaaagtagtttgagagaggcaaaatccaaaagatacaacaaaaaactccaaagcagccaaccaaccaagtgatccagagctaaaattacagataatttgcacacttgggatatgatgagggaaataaaagcatctcatcttgtcaaggaataaaaggtctcactttattcggaagagaaggtaaaaaggttacactgttaattaagagagaaatacaggctgaaaaaagtgggtaaaaatttaactataaccatgtttctataagaaatatgacacagacttcatgaatgattacaaaaaaaggagaaaataacttaggaaggggcagggaaaaatgttcattggagcagggctgggatggggacagtcggctggcacagagcagttaaccaggtcatcccatcagaagtaagctggctggccgtaacacacatggttataacatagctgagatccagtcaggaaaaggtcactcttacagtgaaattggtaaaatcaacataaaaaggctaagagccaattgcagaagggccctaccccaagagatggttgctcaacgtgctacccagtgagctatggaaaaggtgcagctctaattgacacagaggcagctgaggcagctaaagttagcagaaatcagtcatggctattaagagagaacaaaggctccggctgatgtgcctgctcagcctccaaaggttggggagggcaggcaaagaccaggatagtgactgcactgtccaagcctgagggtactgatttcagaggtgaattaccagctacctagacaggtccggccaattcatccaggtgaagaaaaacacatcttcaaaatatcctgttctcctcattctagttccacgtgcaccatacaaccttctgagctacagtgtggtcttctggagggatttccataccaagagggaacacataatgattttcctgccagacgcatacccctgtgaattgtgactgatttataaatcagcctcaactcccacgtagaagttcacgtaaaaatgctcctctgagtctgagcatctccaggcaaactgctaaaaaaaaaaagtccttggactcaaaaatctgaggaccaaaccttgggtcccgcgggcaccgtcccttccccaaagtcctgccaacttggaaaatcctgtttcagcagcctgctagctttgtctctgattcctctctgtttactagaaaaagtgggagactactgtaaagattgtcagctattcctaaattaataaataaattcattatcagctcagtgaaaaagctaacaggatctcttctttaatatgataaaaatgacactaaagttcatatggaaaaaatatatttacaggaacagtctagaaaattatgcaaaagaataacgaaggcatacctaaactgttcagggtctttaaaatgtcaatgttttgaaaatttaaaaaaaggcaagggaagcagattaaagacaaagtcagcatgacatctaaatacaacggaatttttaagaggatcctgatttaaaaaaaaaacctgtaagggacattttggggataattgggaatatctgtatttaggctatatgtataaaactattctatcaatgctaaaaactgtaagcataataatgacattgtggttatataggagaatgtactttaaggagagaagtattgagggtgaagtgtcaatgatggcttcaactcattttcaaaagttcaggaaaaaaatataaacagagataaagcaaaatattaacaactggtgaatctaggtgaagaccttcattcattgttctttgaagttttctatgagcttaaaacttttcaaaataaaaaggtagaaaaaaatcattataagcattatatataaatatattgttttatacacacacacacatatatatttacaaaatataggaagggtcagaagaaaataattataacttctaatcctacccttaaggctacagagatgattgtcatcatttgtttcagtatgtggctttccaaaaccttcttctatgcataccaccacccccacttttaaaaataaattgcccttaccgactttaagggaggtaacatggctgctagtaatcccaaaatcctcttctgggaacactcagcaaacacttgctcagggcttggagtaactgctttttcctctatgggcttctgagatgacacttctgaatcttcagcatctaagtggtaaaacaaactttcagaatttgcctgcatctccacatgtatgaagaggcaagtaaaccactgcactgtcccctgtgctgctacggaataaagctgggattttattcatttattttttaaatttgagagggagtctcactctgttgcccaggctgcagtgcaatggcacaatctcggctcactgcaacctccacctcccgggttcaagcaattctcctacctcagcctcccaagtagctgggattacaggcgtgcgccaccttgctcagctaatttttgtatttttagtagagacggggtttcaccatgttggccaggctggtctcgaactcttgacctcaagtgatccgcccaccttggcctctcaaagtgctgggattacaggcctgagccactgctcccggcctaaagctgggattttaaaagcctatggctgggcatgtctgcgctcagctgtttccttctccaggaggcctgcctgagccctgtttaaatgaaagactgtcctcccagagctctcttacccccgccctccccatctccctgagcctgctctgctgtgctcacagcatttcatcaccttttcacattccacataatttatatttattgtttactgtctgccttctttcagatttttgtttctttcagtgatgtatctcaagcacctagaggtgtttctggagcatggcaggtacttaatacttgatgaatgaataaactgcctatgaaccaggatgctgatcctcaggggaatgagactccagtgaattttgatgatttggattgatgtggagtgtcagactgttttctggaactcagaattatacacactgcatagataagcatcagatagagagggcagaaggccaggtgctcaccccgccatcacagagcaggaaggtggggaagatcctgcactcctgggccaccataaggaggaggctgggacttgcctccagtctcctgagcccacagcatgctcctcaatcctcctaagccagctctgaccttgctgctgctatcctctggcaggctgaggccttcagcagcatctctcctttatcatcctctagtgttccactccatccctacacacctgccaagagggacttctctactttagggcctttgctcctgttggcctttcttctccgaacgcccatccctattgcagatcctagcacattcaaggtcccctagatctcttcctctctaaagctttatgaggatacagtctgccccagagagacaccaatcactgtcaacacccacttacacctcattccgcctcaaattacagttacctgcacctgtgtcttaagccctcctagactgtgagctccatgagggcaggaaccacatgtctatctgtctgattcagtccctgtttcatccccaaggtctagcactgtgtttggcatatagaaagcacttagtaaatacaggaaataaataaggtaggaaagcagtcaaagtgaagaaagatgacattcgaggtgtcatcagcaccatctgaacagaactgagaaaccacgcacccctggcgtctagccaatgtcaagctgtgtgccacaaacagctcagggatgggtatatgtgcattttaagatgaaagagatgaagataatggtcaaatagtctttacctggaagtcctgtaggtgggctagcatctgcaggtgaatctgaaatttgggtctggcatgaaggatccttcgataatgatacacctttatctgccttatttctctgcttgaaatctacaggtctgatttcctcatgaacagctctctttccctaaaaaaacaaaagtgtaaaagaattaaggtttcttataacaaagtttgctccatgattatgataactttttaatgattagccagtcttcatagactaaaaaacttttgaatgccattagaaaatgccactcatttcttttttcttttttgtgtgtttttttgagatagagtctcactctgtcaccaggctagagtgcagtggtgtgatctcggctcactgcaacctccacctcccaggttcaagcgatcctcctgccttagcctcctgagtagctgggactacaggtgcgtgccaccatgcccagctaatttttgtatttttagtagagacagggtttcaccatgttggccaggatggtttcgatctcttgacctcgtgatctgcccacctcgtcctctttaagtgctgggattacaggcgtgagctaccaggcctcgcctatgccactcatttcttatggtaaatctatattctaattaagacagtaactgtcgggctgggtgtgatggctcatgtctgtaattccagcactttgggaggccaaggcgggcagatcccttgaggtcaggagttcaacaccagcatggccaacatggcgaaaccccatctctactaaaaatacaaaaattagctgggcgtggtggcgtgagcctgtaatcccagctactcaggaggctgaggcaggagaatcgcttcaacccaggaggaggaggttgtagtgagccgagattgcgccactgcactccagcctgggcgacagagcaagactctgtctcaaaaaaaaaataagatagtaaccattgcatcgcatcccccatcttccaaatgtccctctgtcagagcctgcagtcccataagaaatggctctattaaaaacctctcatacattctattcagctttcagaaaccaagcatggaaagttgttcccagaggaaaaagacaaagctatgaaattctttctttctttttcttttgactctgtgagtataaaaagttgtgacttcccttctagtacactctggtgactatcgttaatgtactttgttttcttcagtatgaaaaccaaacaaacctttatttacagaataattagaaaattcttggtatctaacattatctttaatatgatgaagataagactacatcaattctatagcctagaaatatgacattgttttcactgccacagatgaagctattttattgctgtagaaactggcattctgtgggctgtgggacagagttgtgggttgtatatatttcctctcttacttttctatagaatttgcctttgttaattaacatggaaggtgtacataaagccaaccacacatgtcacttgatcaaacaaaaccggatgctactcctaaacctaactaatcacaccctttctaccaggttttagcattctttcctagctgctgtttcctagatgctgtttttttgttcttgtttttttttttttttgagatggagtctcgctctgttacccaggctggagtgcaggggcgccatctcggctcactgcaagctccgcctcccaggttcaagtgattctcctgcctcagcctcacgagtagctgggactacaggtgtccgccaccacacccagctaattttttgtatttttagtagagatgaggtttcactgtgttagccaggatggtcttgatctcctgaccttgcgatccacccatcttggcctcccaaagtactgggattacaggcatgagccaccacgcccggcctctttattttaaaaaacagaataaacatacctttgatgcccttttgagaatcccactttggcaatgagacttgttaaaggggccctttctggaggtgggagacttttctagaatcaggagtctagtggtgagctgcccagatgggcaaggtgacagctgtcagctgcatttcctgagaagtcactcagaatccccccagtgactgtttgcactcctgggaccctcagggtgcctttccctattgtcacacaggcttatgtgtggaactgtggctacatgggaagtgttatgtgcatggtggaggcaccccagcttcaggtctgagaaggccaaacgttgactttcactctttggggccaaaggtggagtgtgattcaacaccaaacattcaggaggtgacatgccgtctcccaggggtacctaactcagcctcccctctgcatatgtaacctcaatatcaatcctaccttcaacctctttctgagaaaaatgtgactgtaagactgtcctaagagaggaatgaaactgggagagctacttgctttgttaaatgtaccctctgaaaagacccgacaccatactccctgtaccatatggcacttgcgaagacaatataattcccaagttatggcaaatgacttatcttttttcctgttatcacaggacactgtaaacagaatcttctggatgatgcctctggctaaggttagtttctcagttgttgaaaacaaaaagtatctctagtcattggacggagaaaaggtagatacccttaccagggccctggggttgcttagaagcacgtgagagttgaaaaacagtgatctgtcctaggggccccaatgggatacagtccttatggccactgtagtggcaacactcaggttcagttgtggggacagtgctggaaattgcttgcagctttacttgaagactaagaggaagagccagaggcaggataccctgggcgcacccggctgctggtgggtgggaaggggactcaaaaggtgggaatggctcaagaataaaaacagtgccctgggacctctttggaaaaagtcccatttcaatcctgaagcagggaaggcctaaaacaagcctgaaacatctttctctatcaaaaattaaggaactgttcaaaaaataatggcaacatatcaaaagaacacaaaagccagggaggagcagtttccactgcccaaacatgggacaatttgagcatcaaaataaataatgggtcaggcacagtggctcaggcctgtaatcctagcactttgggtgactgagacagatggattgcttgagtccaggagttcgagaccaaccgggtaacatggcaaaaccccatccctacaaaaactacaaaaattagctggcatggtggcatacacctgaagtcccagttacttgagaggctgaggtgggaggatcgttggagcccaggaggtggaggttgcagtgagccaagatcataccactgcactccagcctgggcaacagagtgagaccctgtctcaaaaaaaataagaaaagtggccgggcgcagtggctcacgcctgtaatcccagcactttgggaggccgaggcaggcagatcacgaggtcagaagatcgagaccaacctggctaacatggtgaaacccgtctctactaaaaatacaaaaaattagctgggcgtggtggtgggcgcctgtagtcccagttacttgagaggctgaggtaggaggatcattggagcccaggaggtggaggttgcagtgagccaagatcataccactgcactccagcctgggcaacagagtgagaccctgtctcaaaaaaaataagaaaagtaatagatttttatccattgaattaaaaaaaacccataaaaaaaccctattaagtccattctgacataaataaaaggataaacggggaagcacagtgcttatgggtggaaggttagttttaagatgctgagggctcacaagaagatacaaatattcccaggctcaaaggtgaggactactgattaatcccatttctcctaacaatgttctctttgttcccatcataatccgtgggtggttaaagtgccgcctacagaagacgtttcatggaaaaaatgtggacggttgagagacaggcttgatgattatgtggcctgtcttctactgactctctggctgaatggaaataataaaaatgttgatgtttctgctggccagttttgcttttgtattcctccacatgagaatgggaccttggtgagctacaaccaccagatgggggaatccttgaactagcaacctgacagacagaggacagcaacatcagcgacccctgtggcagtcaagggccttttcagcagaaacacaagctctggaggcagcatcatagaaacaatggcgtgctcttccataaaacaatctttagtgccactatcacaggttatacctggatccagaatagcttttctgtttatgcaactatgtgtaaattactgcgtctacccggtaaacagtaagcatcagtaacacctaactgttgactgaatataaatacagctacaccgatacagtgtacaccatgggctaggaatgacttttttttggttgttttttttgagatggagtcttgctgtcgcccagtttggagtgcagtggcgccatcttggctcactgcaacctccgcctcccgggttcaagcgattcccctgcctctcgagtagctgggactacaggcacgtgacaccagcctggataattttttttttttttttttgtatttttagtagagacagggtttcaccctgttggccaggctggtcttgaacatctgaccttgtgatccgcccaccttggcctcccaaagtgctgggattacaggccactgtgcctggccaattaatttctttaggtgcacaatcttgtttaattcttataaaaactaccaggagacaggtaatgggagtggttaacacagatatggaacttactatcaactcttctaagcacttgacatacagtagctcaaagtacgtcatatatacaactcctcacaataagcctatgttacaagtatatcatcatccccattttatagatgagaaaactgaggcaggctgggtgcagtggctcatgcctgtaatcccatcactttgggaggccaaggccagaagatcacttgagcccaggagttcaagaccaccctgggcaacatggcgaaaccctgtctctacaaaaaatacaaaaattagccaggcatggtagcacatgcctgcggccccaggtactcagaaggatgaagtgggaggatcacttcagcctggggaggtcaaggctgcagtgagccaagatcacgccactgcactccagcctgggtgacagcgagaccctgtttcaaaacaaaacaaaagaaaataaaacaaacactgaagagatgataacaacatgcccaaggtttgatggagcaggcatgtgaatccagcagtctgggttaggagtctgtgctcttaacctctctgctatgctgcactgagtgaatggctctctctagagttcaacctgtgattctgtgtagtaaagaatcgtcatttacattgcctgcttctgacagctcagcaccctggacagctttcttctctagctgctcctctgacgctccggtgggcacagtgactggtagggcctgatcttctaggctcgagtccccatctggcaatacacccagcaaagctagagctttaaggcctatgtgggaagcaaatcagagaatggttagaagttttataatgagagttcttttcagcaagtgccataagttactttgccattatatagaaataaataaatgagttctgcacaaaccaaatcctagaggactcaacgtgaacatccctcgctgtctaaatctactcagctcctcctctcagatggtgagaggctgaatagcaagggatacctgcactttatactttattaacaacagaagataaaacatataacaggattgtctatttagaaaataatcaacattatacttttatactagccccacacaatcagactgctcaattctcactggcaaactggtatgggaactgctctaaggtgctggcgttacccatgtgctatctcatacaggcctggttccctaatgttgactagaatggggatgccattatctgaaggaacttagatgtctccaaggtttaactttcaagttgctttcttcccaccactccttagtcgagtcagattcatgtcgatatattgctaaactattttactcgtaaacagctctcatctagaatacacttgtgtggaagcagatttacactccaggttaagaagtctggattctttcagcaaagtttggtagattcaaatactagactgcatccacagatataaagagttttaattattatttaaaattagtttgaggtattaatattagtttcagagaaattaaatgttgaacttcaatgccaacatttctctaaaatccatcggggaacttaaaaattaagttccacaccagggtaagccccttttgtggaaaagtggatgttgccacctgtaaactaagcttagtattttacatttgccaaggctttttttcaccagcaactgagggctggttttggtttctgtgcattgggaagtcaccttttccctgatgagccttcatcagacagtccccgacgagctgcatgcactggctccgcagggtggtggcactgctgcgcgtctgggggtccagcttctccccatccacatcctctgcactggccaggtgggcgctatagagagccagggcagcaaagagcagccaggagtagttatggatatatggctggatgagcctctgccggtcactgatccgaatggttaccattgggtgggccgtgatgctgtgggtaggcaaatggctgcaaaggcaagacacatttaaagcttacaaccctccaaaagcttttgtggctccaaacaggagcacagggccttaggagagcatgtggtcgcaactgggcattagtcacctctaggatgcgcttactgaaaatgtaaagaaaggtgtgggccctctctccagaaaaatgaagaaacacaaacacagaacatgcctttcagggtttcacaatccccagaggttgtctgcagaaattggactaaggaagaattgcttattgtgattttggaaggtgtggtaatagcattttggtaatgtgaataaaacccataatttttaaaggggggtataaagtatgtaggaaggaaataatttaaggcctggaatttgctttatttatgtatttatttatttgagatggagtctcgttctgtcgctcaggctggagtgcagtggcgcagtctcagctcactgcaacctccgcctcccaggttcaagcgattctcatgccttagcctcccaagtagctgggattacaggcacccaccaccacacccagctaatttttgtatttttagtagagacggggtttctccatgttgggcaggctgatctcgaactcctgaccacaggagttcgcctcggcctctgaaagtgctgggattacaggcgtgagccaccgagcctggtcctggaattggctttaaaatactttaacacaggaaaaaaaaaaaaaagcaataaactaagcacacattacaaaatcttcctaactgctgaacctgggtaatgggtacatgaaggttcactgtgttagtctctttacttttggttatgtttaaatttttaaataaaaaaaacttttttaaaaaaagaaagaagtcccttttcaagtgaaggaacgtgtaaataaaaggcttggtggcgacggtcacttgagacatacccgtaggagtatttcttcgctgcatagcatccgtagcaaagatcaaagtcatcgcaaacattgcagttcatcctccggcctatgatcaaaccctggcagtggtcacaggtaaactccatgttgaccatttcatggtcgtctccgtggccctcaggcttcaccccacctgaggagaaacacagcagtgtgaggggatgaggtagagggctcctagatgggctagtttccaaacccaaaccaaccccagcaccagggccgttcccaagtgactgctcagggatacagggcccacaggcgttctctggagacagggtgctctgcctgggtggctcaaggcatatgaatgagactcttggcacagaatttctcggcaatggtacagtgagatcaaatgcattatcaggactgctgtttggtggaaacaagtccacatgttaatttgtgagctgtctcctatgacccctccactaacaaagagtaagcttctgttgatgtattcctgttaacaagcactgaggactgatcaggatatttgctcttcctttttcactccagaatcacagatgaaaacagacttccaaaataaaaaaataaaaattaaaaaattaaaaaagggccaggcgttgtggctcatgcctgtaatcccagcactttgggaggccgaggcaggcagatcgcttgagtctaagagttcaagaccagcctgggcaatatggtgaaacctcgtctctattgaaaatacaaaaattagccacgtgtggtggcaggcacctgtactcccagctacttgggaggctgaagcaggaaaatcactttaacccaggaggcagaagttgcagtgagctgagatggtgccactgtactctagcctgagggacagagtgagactttgtctcgggagggcggcgggggagaaaaaaccagacccagacccagtgagtgagagagaataacagtcaggaaagagatgggctgcactggtctccttctcactctaaggcccttgggcccttctcactctaagctctgtcatggaccctaaagaatgctcctcgcgcctggcccacttctgttcattctcactgtcatgaacccagtccaggctcccatgcctgtgtgaatactgtgactgatttcctaaaggagactcttagcactgacagaaccaccttcctctagcatagctctcatcatgttattaataatacctacttcaaaaaccttccctgctgtctctagactattcaaactccttagcctagtatcttggggtcccacagtcgggggccccacctgtcttaatccatcacttagttgggcaaacatttcagcatggccatctaaagtcactacagacactcctctgtcccagggtttgctatgcccttgatggtgataccatccccaacgtttcctacacatcatccagttctaacttccttcaaaaaccaattctcattccacctccttcacgagccttccctgcagcaatgctgctactgcttctaaacttttccagaaacaatctgtaccctcctttataactcagcacacacattcttgtactggaatagacattctgtggatctgtccagtcctcctgctggactgtagatggttccagggcaagggctgtctcttaccactgggccatgcacaaaaaggccagtcaggtgtgcactactgtgcatctgttttacctcagcacctagaagtcaagtgtacgaggatttttgaagcttgcttgtgtatgtgtgcgtgtgtattttgctacatgtaaacactgcatgattcagaagcaaacactatttcctgaaaactccactgaacatacatacactggtcccgagtgtttattatgtggctacacccagcatgatagaagaaggaagcacgacagatattagggctgtggagcttttcatttagttgaggagataaggctcatgttcgccaagaagtcagagaaaataccactgggcagtactttgatttagtacactgagagtttttaaaaatgacaagatcatagaaatcagaagtgatattgcctttggatacggcgtacccagttcatgaaatttacctaggaagcaagttttgcagagatccatgtcgctgcactgcagacagcggtatcgatgccagggggcaatctcatcacacccatcacaagagatgtccacatttaacaggtcacagtagcgagcaatgaacatgtgcatctgtaaggccaaacatatacaattaactgatagattttctaaggtggccacaattcactaatcaattcctccattcactaggtactgaagatgttccaggcattgtactaagtgctaggatttgataatgaataagctcctcagtgtctagttgggaattccatcaaggaggtgatgaccatttagtatgaccagtgctttcacaggaaattgcaggaggcttagaggacagaggactatggctaccaatgggtattcagaaggtcaaagaaggttttccaaaggagataattcctcaggtgagacccaaaggacaaacaggtactagacgggtcggggtaagggaggtgggcatgtcagatagaaatagcaaatttgacagacagcaaaaaggggatgagagacaggtttatgaaactggcatgactcagtgcgtcgaatacagtacagaggggaagagtcagatgaagagagaaaggttaaaccacaaagggccttgcatatcagtcttaggagttacagattgtttttagagagaagagtaatgtgatcggactggagtgctcttctggaagttgaggaaagaatggatcaaaggggcaagcctggactcagtgagactgaccatgaccaaagcgttaaaggaaccccatggcacattataagggctgggactgagtagtaggcgggatggtgaaaggtgcgtagatttgaggtgttgaggcagaagtgggaaaccttggtgaccgactggatatagggatcagtaaaagggaagaaagtttctggcttgggtacgtggttggacgatggtagtgttcacagatacaggaaacactgcaaaaggagtactgtccctggcacttacaggcaaactttctgcagggatagtctgggtactgtctaatgagcaaacaaattgctttactggaaagtacttggactacagtattgtttctctttagggcctggaaatgagggatctaaatcagtaagtcatacagtagaccagagcaaatatgccaagtcaccttacaactacagaactcccaaaaggtattaacatatgcgagagaaaaagccacaaaggcccacttggcaagctccatccaagcaccacagtggtgctacgtgaacaaagtggttggcacatagtaggcactcgatacttagaaaatgaatgaatctgaggcagcagatgcttggcacatgtggtagcgatggatttaacacctgacgtggagatggacacagtgggctatctgagcctgagcctttgcacatctgaatcatgcagctctgatgccctctctatacataacggctgctcccatgctcaccaggcagccttctgatggaaacgtggcttcccacactgcttgtctacaggaagagaatgtgctgctccaaggacactagagcccaggccctccagcaattctatttctcactgtaaattagtaaactggcacctcatattgtacatcagctttaagagccaatttttcaatgagtctagttctacggcagggagccactctgagtgtagtcaaatcaggatttatagcccctcaggttaaaggttaaacaccagacgctagggcagcagtccccctttttggcaccagggaccaatttcgtagaagacaatttctgcacaggactgggtgggggatggtttcgggatgaaactgttccacctcagatcatcagtcattagactctcataagcagcgcacaaactagatgcctcgcatgcgcggtttattgtgggctcatgctcccgtgaaaatccaatgccgcagctgatcggacaggaggcggagctcagcctccctcgcttgcctgctgctcacagcctgcattcggtcgcattcagcggttggggaccccttcactagggtattgaatgccacctgcagccctctcaggtaagagcctgccagaacccccccaggcaaactctcctctccaaactcctagcaaatcacttcagagtactctagttgagaggtcttactttcctctgcttctctggatcttcctgggctattttttcataccaggcctcaaacatgccatcctgacactcatccatccattctgaattctgcttggcatcagcaagctcatcttcttcactccattggctgaaagaaggacataaagagagaaaagcatgcctctcccaatcaccaaggaaagtactggttagcagaccctgtgtctataggtctattatattgggcatttttcaacttctgagagggaaaggtcaactgcttttcaaagccccaggatttgtcaaatatttggtagatatatgccaagaaagaaggagaagccctttccagagtagactataagggatgagaaattaagagtttgaaaggttgtaccacatggcataattccactggacaatcatttatggtgaacctactatgtgccaggcactagggccaaataaagttattattattattattattattatttagtctgatttagacatgctcagcatatcctggtggaatcagtacgagaagggaatcaggagacactgtgacttcagctctaccaccagctgctgtgagaccttgacacatgactcagccctggtcctcagtctccccatttcagacgagatcaggtgcattcagggtggtatggccacagtttcctcatttcaaataaagcgcttcaggtagataatcttataagttccttttggatgcaaaattgtaaatttccataatttcagtttacagctcgttttaacaaatagaactttaaacagaaaaagatttgcttaagagcaaatacaaaatatttaccaagctacaaatacacattcattcattcatgcattccaacgaaatggttttgggcctacactcatactcaagctttgcgctcggtgccacgggggcttgctgtaaagggcgcgcttccttccctgaggactgtggcgtgcggggagacaaagcgagaaaccgcgagcaggcccacagccaagatccacaggctcatgccccctagtgctgccccgcctctgccaacggagctccaacagcgaggcgacagctgaggttcgtgaactaaagagacggctctaattctgtccccttttcccttggaaccgctctcctgagagagtggagactgtcctggtgttgactcattcacttcttcccacttctctcctcttagtgcattccccctccccttctcctcttttctacacatgaatggccacgaatagggaagtggatttgagtagagtggagagatacgggccaaatcggagggaaaaaacccttcatacatgacttttttctaactgaggtccttataatgtgcaagaagttagagtggctaacataacatatacatgtaacaaaaattatggaaaggatttcccaattcagcaagctatactaagatcaccaaaatgcagaggattctcggcctcagagctcacgagttcaccaccaccaatgtacatagctctactgcatgccagacgcggttctaaacactgaaatacataactcaggtactcatcacaacaagcctcggaggcagcaccattgttatctccagctctgaagatgaggaaactgaggcacagagggattataagacttgcgcaaggccactcggctaggatgtggcaaagccaagatatgacacagacagtctagctccggagtctgtgctcttaacgcccccactatgttccttgcgtttcataacctacattaggaactgcagagcgcaggaccgtgctcttacctgatcacactgtcatggacacttatattctcctgtgacattttcatgaggagatctggtaactgaatatcaacaaagaaggcgagatcattgggttcccagcccatatccaaaagatgaagcagggctgtctgaacacaggataaggcagggagcaaggacctaaagggccatgaaagtgaccattagcagagctgcttactcccaacagaggcaacagaagcaattcaagtaggtgacctggtttgcaattgaaagcagaagggaacttcacattgctggtttgggttcctttcaaattcctcatactccacacaaacatccttcaaagcttacacaaaataactctgaaaagtgtaaagtaaggtttccaccctgccaggaccaccacaggggtatcttatggtaaagaactgagaagtgaaaatcactttctgataaactgcaagatcagggccagctccaaattagccaaggttatgcagtttagatttaccgaagaatcatttgatttaaggcttatgtctaaaccatttactaagaggactgggaaatggctttatactcgttttcaaactgtacataatacataatatactggctgggcgtggtggctcatgactgtaattccagcactttgggaggccgaggcaggcagactgcttgagcccaggagctcaaggccagcctgagcaacatggcaaaatcccgtttctacaaaacataaagaaaattagccgggcatggtggcatgcacctgcagtcccaactacttaggaagctgaggtgagtagatcaattgagcctgggaggtccaggctgcagtgagccacaattgagtcactgcactctagcctgggtgacagcatgaggccgtctcaaaacaaaccaaaaaatccctaatataccaaaacagaaaataataggctataaattcttagaaaaacccagactcatccccttaaaaagaaaatatacacaccagacagaaaaaggactgggagaaaatatacgaataagttaacattagtgattagctctctaggtggtaacattagaggttatttttattttattctttgtgctttttggtatttttgacagtgaacatatatttcttttataatcagaaaaaaatacattttttttctctagaaatgataaagttatccagtacctgtcatttaggctactaaatcctttaactgctttgaccaaaaacagaacaagttgatagtaagtgtctcgaatttctttgtgtagatcagcaccacagccttccaggtgtccaaaataactagaaacagaggaaatcactgattcacttaattgccagaacatctttttcttaataataataatgatttcttacatgaaaaagagcaagtggcagtcagctgagcaaagcggcacaggaacttaagtaaatacaaatataatacctatagaaggtaacacacaaaacagcaagtgagtccctctgacgggctcaagagagttacccagaagcatggagatgagattatttatcttctttgtgaatataaacccatccctcccaccactacttgggtgccagatactgtgttaagtatttttcacaaatgacctcatttgatcctctccacacaatcacgctcacccctctgcctcccttcattgatgactttggcaccagcctcactgtcttttctaccatgatcctggccatcttggtgacttcaacatccatgaaaatgatgtctccattcctttttccctcaattctctgccatctgcatctccagtgatcttctcttccacgcccttagccatcttagtttgatggtcatttcctggaccttgttatcatgtgatgacatcatctctgacacactgatgccagagcaccctactctgaccccagctctcctgctcacccaggtaggactccaacagcagccttttcttcaataccagtgggcgtcagcccaggacgctgcctcatgttcactatctactactcctgccatgctttctctctgctcccttctcagcttagattccatggcccataatcataccttagcaaacactaactcccgtgtcccttccttcctccatgtacttgcctgagaaatcttatacctatatcaaaacagctgaatgtcatggaggaaacaccacacaagcaagctgactagtatgactttaaatttgcaaccataatgatcaaataagccctcaaaattgtcaggcaattcagtagactggctttctcaattttcattactatcaaaccttcccataggccaggcatggtggctcacatctgtaatcccatcacttagggaggctgagccgggcggatcaattgaggtcaggagttcaagaccagcctggccaacatggggaaacccagtgtctagtaaaaatacaaaaattagccgagtgtggtggcacacacttaggaggccaaggcgggaggatcacttgaacctgggagacggaggccgcagtgagccgggatcatgccactgcactccagcctgggtgacacagcgaaactcttgtctcaagacaaaaaaacaaacaacaacaacaacaacaaaaaacaaacaaaaaaaacactcaaccccccacccccaccaaaaaaccccttcctgcttctcctgatgccaccactacctccttctcatccttccattctctctgatgactatccttatattttactttttaaaagagaaacttaggtatcttgagaaagaaaagtaacaatcacataggaattcccttacctttgcaccaccaaatatctaccagccaacttgtggacaccgtgtgtcctatttcctcactactacagataagagcctccctggttcaatcaaaggccaatctctcaacttatacaactgctactgcaaattatcccctctcttcctgcaccaagtttccttatcactgattcattcccaccaacacacagaagtactcttacatctctttgaaaccctcagttgacctcacatcgccctccaaaaacttccccgtttctctgctccctttgaggccaaatttcttaaactaaatgtctgtagtctctccattttatcaccctcattctcgctggccttttggccaatggctccagtaagactgctgtcaaatccagtgtgtttttatctctttcgaactctcacattagtatttgacacaactgatcattcttatcttttttcttttccagggaagggcactcacctgacattcttatcttttgagatccattcttctcttgacttctgggacaacagcatcccctggtttttgatctacctgactggccactgcttcttgatctccttagctgacactcctttctctgcttgacttctaggtaaagaagtgtccctaaggctcagtcccaggccccttcttgtccatctctgcaccctttctaggaggtcttatggctctaaatgtcacctacatgccaactgcatccaaattctatccctagtcctgacttctttccgtaactttagttaaaacgctgacctctgttttctcaatatctttacttggtatctttacaaaaaagatttccagcttaacgtggccaaaacaaaacttttgattttcacccccatctgtttcttccatactctttccctcactaaaacgcatcactatccaccagctgttcactcccaaatcctaggagtttcccatgattcctttccttcatttaccctctccatcttatccaaccgtaagtcctgacaactctacctctaaaatgcattctgaatctcatcctttcctccccatctccagtattattctctggatcaaaccaccatcatttcttgcctggactactgccacagactcctaactgcttttcttatttccacctcttttcacacagcagccaggggcacctcttataaatataaaacaaagtgtgatcctcctgggcttaaaaatctccagtggtttcccaactacaacttggtataacatcgaaatactttacagtgataagggtcctgcctttctcaccttatcccatcccattttccctgtcactcagccacactggttttcgctctgttccttggactaactccccccctggagcctctgcactgttccttctgccttcaaggctcttctctctgatcttagctggtcattcacctctttggctttcatctcctcagcctgccttccctgaccatccaaactaggtcactgtattaatcaccacataacaatatcactatctggtattttttcatttatttggttttttactgtctctctctcctcaatataatataaaatctgccttgtctactgctgcataacacccagaagacattctagcacactagatgctcaaaaggtatttattgagttaatcctaagaaccaccttttgaggtactcagattaatatcttttctgtaagccttatatttagctcacagcttccaggagccaaatgatgcatgagtatatgaggaatgcaattctcaccatctggaaagtaaagctcatcaactcaccaggaggaataaatatgttcccggcagttacatattaaaaggatataacccatctttccttggaatgagagaatgaattaaccaaaaacgtacatttgtatcctacatagaaatgatgctgctattaatcagagaagataatcaggatttatttacaatgatctttgctgttttccttctggacctgtcctttgtacttacttggtaaaatctttctgacaggtcagaagttccaacaggaaaagtatgaaaggtggatggaagcagtggggctgcccaagggattctgcacagtgctgagttatcttcaggacttccaggatgctctgggcctgggctttcctcagggaaagaaccttcacaacactggagacacaatgcaagtcaggaacacccagaaaactcttgagctggggcagacggaaaatatccccgccaaagccctgatgccatatatcaaagaggaaacactattgtgaggtattagaaacaccatgtaggagaagtaccaatacctctttactatttttaagtcatcactcagcagcactacaaatcagttcatgccaactgtccagaagtccgacaacccattatttaacttaacgaattaaaaaggaacattgatattttcactttccatagagacaaagccttaattcttaggacaggaaattcctcactaacttaaacatgcaatacttccagagatgtaggcctatgaacaaataattttgttggaaaatatcaaatcctggctgggtgtggtggctcatgcctgtaaccctctgatgcagaaagattccttgaacccaggcatttgagaccagcctgggtaacatagggcggccatgtttctagaaaatgccaaatccaaatttctccctgggttaaaataagacagttttataagtggcagctacccaaaaaatgcttccttttaaaattctaacggtacgttcttgagatatactttataaacagtataatatataaatcttacatgaaaaaatatcttttttttgtttttcagacagtcttgctctatcacccaggctggagttaagtggcataatcttgacttactgtagcctcaacctacctggctcaagtgatcctcctgcctcaggctcccaggtagctgggactacgggcaggtgccaccacactcaggtcatttttttttttttttttgagacagagtcttgctctgtcgcccaggttggagtacagtggcgtgatctcggctcactgcaacctctgccttccaactttgagcaattctcctgcctcagcctcccgagtagctgggattataggcatccaccactacgcccagctaatttttgtatttttagtacagatgaggtttcaccatgttggccaggcaggtctcgaacacctgacctcgggtgatccacctgcctcagcctcccaaattgctgggattacaggcgtgagccaccgcacccagcctcagctaatttttaaaaaaaattttttgtagatggaggggggggggtctcactatgttgcccaggttggtcttgaattcctgatcccaagtgatcctcccactttggcctcccaaactgctgagattataggcatgaatcaccgtgcccacccaaaaattacttctttaaagaaaaaaaaaaaaatcaaaacttttcttgaatattctaaaacaagtcttgatctatcctaaatattatttgttcgtttttaacatgaacttcaagcctctgactagactgggtacctacggcttaaaaagagaaagcgacaggaaggtaacaacgggcttacctcctgtgcgagagcgactgatccttaatgaagtccatgacgtccttcagcacagggtatttctctttcactgtgggcaccagtctggcctcctccatggatcgaaaggagagcagccggagtcgccctcgggtgaagggaggccggcgggtgggtgtggaaggtgacaagggctcttcagctgtggcaggggacacgtctgcagcaggaaggccactgctggatggcagctttggctgggtgcccaggccaggactctggtctcctgtggcagggggtgcggcttcagtgggagatactgaggcttggaaatgctcttccaccacagagcttgtcctctgacgcttgttgagtggctggagatgactggtttcatcagcagtctccaacttttcgcagctttcttttgaacttatgcccgtgggcagaaattttagtaatagaagactcttctcaatgcactcttttgctagatgcaaacaagaatcataattgaaaaaaaaaaaagttaaaattatgggggagggggaggggagagggatagcattagaggatatacctaatgtaaatgatgagttaatgggtgcagcacaccaacatggcacatgtatacatatgtaacaaaccggcacgttgtgcacatgtaccctagaatttaaagttaaaaaaaaaagtttaaatttattgcctacttctgtagagaaaataagttaaatgtcacaatttagggcaagagacagcttcatgaataaagtgatataggcctagtgtggtggctcacgcctgtaatcccagcactttgggaggccaaggcaggaggatcacttggggtgatacctcagcttgggtaacatggtgaaacccaatctctataaaaaaacaataaattaaccagacatggtggcacacgcctataatcttatctacttgggaggctgaggctgaaggattgcttgagtctgagaagttgaagctgcagtgagccgagatcatgccactgcattccagcttgggcgaaagagtgagacactgtctccaaaaaaaaaaacaaacaaaaaaaccaaaaaacgaaaaagtgatacacatatttactgacagaatagaagaacagaatcaaattttatctcattatagaaatcaaaatctcgccagtactatcagcacactttttagaaaaagttttattgtagatgttttcaaacatgtatatagagaaaataccataaggacccttccatgtacctgtcactcagcttccgtcattattaactcacggccaatcttgtttcacccccatcaacccctcactccccggattacttccacacacattccagcaccacactattttatctgtaaaaatttttagcatatttctcttaaaaatatatgagttttaaaaaataacaaccataatatttaaaaaataatagtaattcttttatttcactgaatattcagtgtgagcacactttaaaatcataacaaggccaggtgcagtggctcatgcctataatcccagcactttgggaggctgaggtgggaggatcacttgaggccaggaatctgacaccagcctgggcaacacagtgagaccccttctctaaaaaaaagtttttaattgcttaacacaggcgatacaaagaggaaaaaaaaatttgccaggtgttgtggcacctgcttgatgtcccagctacccggtaggctaaggcgggaagattgcttgagcccaggagtgggaggctgcagtgagctatatgactgaaccactgcactccagcctgggagacagaacgagaccccatctcaaaaaagaaaaaagatgtagctcaaaaagcacctgatgccgcctaagagaagtgattagaaagatgttccatttggagcaggccaataaaacattactcctctttgggattttctctatttatgatacatccttggatactatatttagcatctgtgttactttccctaggtcaacacagcctcaattaagataatctagaaggtgagtaattggttttccaggctctaaaacgaaaacagaaggctcagggacaacagctggtgttagcacactcacccaggctctcagggttcacctcagtagcttctgaactatgtttttcttctgcttcattccccaggctcatcagggacttctgcttcatctctaactaggggagaatttgagccacatcattatgctgtccaggcagggaagcaaggacagccatggcaaactacttcaaaagcacacagcactgacaccacagagtacttcacagttgtatcatttagaggggtttgtaatactcacaaccttattacttaaaaatttctagaacactggtgctgcagggggctttctctaaagcctatctagtactgataaagaagaagctgagatctagagaaatgaagagtcttactagggtcataaacccagtctgctgcagattgaaccaaaatttcagaggggacatctctacgtgatgctgagacctaaaactggccatggttacctagtatctaaagcgatgctgttccgccaactctacggagttccacgaagggatgtaaagaggggtcaactaaattctgtttcctctattttcaactgtccagactataatttcaagggttctaaattgttttatatctattcatgtcactaaactttagcttaacaaaaatcctaaagctatattcttgagaagagaacaattcatcttaattccatgatatcacggtagaaaacctaaaatatagcaaaatcacatgcaaagaaaatcttaccatccatattcgaatcccatctgccaaggaataaacctgggcaaactcttcactcagggctattttgcccccactgttgactggggagagaagcagagatggagattacattcaggtaacacaattcactactgcaacattaagcacaaaaaatctaaatctgctgaagtacaggaaaagtcctcctgacaatcacacattgaggatggtaagagagactcagggaaaaaaatattcaattaagccacaaatacctgtgtgggttcctgtgttatttcaaactaacttttttcaaactaataatttctaaaatggaaataattttaaaagtgtgtaaaatattaaaagatataaaaatactaaaagtaaaaattttagaatattaacagtgagtaaaaaagtatttattgatatggaagaaagttcatggtatattaagtaaaaaagcaggttatgaaacagtataaataaaatgatcttatttaaagagagtttatatatttaaaacatggaagccaagtgcagcagctcatgcttataatcccagcactttttatttttattattcttattgtttaaatttttttaagagatagggtcttactctatcacccaggctggagtgcagtggcaccatcatagctccctgcagcctcaaactccaatcccagtgctttgggagactgaaggtagattgcttgaggccaggagctcgagaccaacctaggcaacatagcaagactctgtctctacaaaaaataaaaaattgtccaggcacaccggcatgcacctgtagtcctagctactagggaggctgaggtaggaagatcacttgagaccaggaattcaaggttacagtgagctacaactgtgcccctgcactctagcctaggcaacagagcaagaccctgtctctaaaaacaaacaaaaaaataaaatgtgtatggatacacatatatatatacaaatatacatacatatgaatatacctacataaagtccaggtaaatagaaaaacattcataaaggttctaagtggtgagactgtagctgataattattttaagcttttctatacttaggttgctacataaacaggttttgtttataattagaaaaataacaattttttttgagacagagttttgctcatttcccagactagagtgcaatggcgcgatcttggctcactgcaccctctgcctcccgggttcaagcaattcaagcaattctcctgtctcagcctcccgagtagctggaattacaggcacctgccaccacacctggcaaatttttgtatttttagtagtgacagggtttcatcatattggccaggctggtctcaaactcctgacctctggtgatccacctgccttggcctcccaaagtgctgggattacaggcgtaaagccactgcacccagcctaacaaaaaaaatttttaaagaaagatctatgaggcttgccccttctcttcagctaaaacccaaaggataatatactagaacagcatgaagctctcttttgcatctatgttacaatgcagtaagtaattcctgaagccctggaatacgccagggctgtaccagacactgggaatattatgctgagaaaaacaaagttcctgccctcaagcagcttatattcaagttgaaaaactcctccccaccctttctaaccccaaagagtgactaatttttagacaaagatgagcaaatttgctagacaaagaccattctcaaagtagttcagtcttaactcagaaatagtccttagacatataatatctatatcaatatctatatcacaaaggcagagacagaaagaactaagacaagcctggcctccttcaaaccaataatggcaggcattctagaaacaacctgcacacagcaagacattccgagttcccacagttgtagagttcccacagttgactgtgtgttttctcttctgcaaacaggtatgtggtatctgaacacagcctgaagtttcccacagcaggaagccttccatttctcagcttttaacccacaggcttttatccctctactgaaaattccttcaagtaaaaagattatccagctttcttactataatttgattacaaaaatacatattgacattccccccgccaaaaccatacaggttacatcaccccctcgattcctcagcagagaaaaactcttccatatgacatttgtttccataaatcactcatgtctcaacacagttttgtttatttgagcagctttttaaaggagatattaagatttggggatgtaatcaagatgttttaacaatcagaaaataaattctgcaatgtgagatccaaagaaatgagcaataaaggtggtaggaataaaaatatcaataataacaaaacgaggctgggcgcggtactcacgtctgtaatcccagcactttgggaggctgaggcaggcagatcacctgaggtcaggagttcaagaccagcctggccaacagggcgaaaccccgtctctactaaaaatacaaacattagccgggcgtgttgatgggtgcctgtaatcccagctactcggggggctgaggaaggagaatcgcttgaacccgggaggtggaggttgtggtgagtcaagatcgcgccactgcactccaggctgggtgacagagtgagactccgtctcaaaaagtaaaacaaaacaaaacaaaatgagcaacagtcaattacccactctagtggaaggaagctctgtttttgcttctcccgcctgcgctgcgtggagaagacataccctgccaggcggttaggaagcccatgccttatctctaggtagggcttgaaacacttttcccctgaattagtatgaaggtagagagagactctccctccgtgtgggtcctgctaggcggcagggaagcagggtaaatacagagatggcatccctaagagacatgaggaaaagagatggtgaggagaaggttatcagcaaaggaagcctagtggggtgatgctacgaaggcgctgcaagctagctaaaggtaatagttaatacctacagcttcctccttggttattactacattcaagaacttaaacatctgtggttttaattggaatttcttagaatgttagagcgaatcacccttaaaccaattttacagataaagaaactgaggtgcagaaaggtcgtctgattaacctgaagctgcacaacttttgagtttttgcactgggaccaggacccaagttaaggtttctttccattaaatttctcagcagttttccatgagaattctggataaagataatttacctgctaattttgcaactcaaggttaggtgccacacattataatctgctaaccataaagtggccatgaatcttttaataggcaaagtagaaccaacaagatgatgtttacagttatagaaatgtgtttatattttaaaatattttaaatgttcacttaagataggctttcttaaaacttagcaattagccttcagatcaaaaatattccctgtaataaagttaccatatttttgcagcttctcatataaatctggagtgcgatacaccagagcagcaaaggtggcgttcacagcttgatcaatagtggaaccagcaactatatctgtctttggggcctgttttctacatgcctgtatgaatcctttgaaaagttctgaatatggcccacagaagttctgagcaggctctgactgggcaaaatcaagaagaaaatggcggcaggggtcgtcaggaatgttcttaacctggaaacaaaaaataaacccatcacatttaacacattcattcaaaaaataaaatttattgagcaaactattaggccaaagcagaagtataaaacacagtgaacactctccggaagtttaaatctattttaggaagaccagacagagatatgagttaaaaaaagataaacataaataaaacattaaaagcattagaactagcattcccgtaaagcaaaagattatcaagtgccaaatgcctagaagggatacccagtgctgagaattcaaaggagagagatcctggtaggttaaagtaattaagaaaagcctcctggaggatatgggctttggcctggaccctgaaggattggcagatttggctctgaggaacataaccattagcagaggttacgagtcagtggggagactgacctggcctgaagtctcagctggggagtgatgggaactagagtcagataggtaaggtgaaaggagactgcagagagccttgactgtcacattgaggagttagacttcaccctgtgggcaatggggagccattaatggtgcttggcagtggaatgacaagataatgcagtgattataaaaaaaacttggtaggtacgaatgtcataaggcaggtgcaaatgagggcccggataaagatgcagacagaggaaaggacagagatgaacatcatgaggaagaatccacaggacctgcaagctgactggacaggaatggggagacaggtgaggacaggggatgctagggagcagtggcttcaggcctggggaacactgaccaccacagaagtgaccggtctttggttttacacttctgagttaaggggagtcaggacatttaaatggaaatgcctcacaggaagatggaaacaggtacttggagcggggagaaaaccagacctggagactgatattaggaattagggccacaatgtttgacaggagaagaaagtggagaggatgaagtcttggtgggctgtggggaagggaagaaagcctgaataaagcctaccctttagggaaggaggaatatgaaaagtcaatgaaggaggcaagtgggcagtcagatgtaagagaagacagcggactagcatggatccaaagaagagagggtctgaaggagccaaatttaacagaggcaaggagaacagaagctgaggaagagccactggatttggcaattaactactgaataacgtggggcagggcagggaggggaaggaagaaaagtagaatacagaaatagagggaaggagaggtgaaaaataaagacagggcaaactttttagtttttaaaatcttatacacctaaatcatgtgctgtaattctaaggagaacaaaaggtatagcacaaatcattgctctaaagcttgactcagtaggcactagaagtacactcaattgtttgcctgataactccatcaacagagatttactgagcacctcctacatttcacccaagtcacgcattcagtatttctgaacacctattgcgcactggcccctgtgggacacggtggcgttaacaagttaacaaggtatagtttctggcctcaaggagctaactgcttaatacgggtagtaagatagaaacacaagtgtttataacttaaagtaataaatacttgcaggcagtttccagtctaaatagaaagaaaacggaagagtaaatacctccttactattccggtgtgggtgagtgggccagcttgcttctaattccaactctggacaaacctgatgcctgaagacaggtttccacagtggggagcttaggactaatgccatttttgcctgaggtactaccatgttacttcctaactctagaaagagaagaagacatatgacagttctatttttgccttaatatattgagaatctttgaaatgagaaagaaaaggttaaaaaaaaccatggatactattaaaacttagagaaagtttacccacataccagaatgtaattgtgatactttgtaaacacataccacagattaagctaaaccaccaagtcctgaaatactgctgctctgtggaacaacttcagttacaaggtaccttggaaatgactaatctgtttatagtaagctgaaaataggatatgaaccatttctggcatataacacgaggccattcaggaacatttaattatggaaaaacattcacaatttgtaaacttaattctgtagcaaataataaatatccagcatagatgtgtttagaataggcaaagagaaaagaataggtggaaataaaaatgctaatagctatttctttctttcttggagaaatattaaaaaaatcagttacttctgagtgttaggattaaggatgattctattttcctttgtttttttccactatgtaatttttctatattttacttctaaaactggaaaaactcaagaaatgatcaagaaataaaatacagtagaaagttttattctgtaattcttgttccctggaagaattaaataaacaattatactgaacacatctttttccttttgttttaagagacaagagtctctctctgttacccagactggagtgcagcagtatgatcacagctcactgcatgcagcctctaactcctgggctcaagtgatcctcctgcctcagcctcccaagtagctgagacaaaaggcatatgccaccacacctggctaatttttacattttttttggtaaagatagggatctcactatgctgcccaggctggtttcaaactcctgggatcaagaaatcctcccaccttggcctcctaaagtgctgggattaccagcatgagccaccttgctcagccctgaatgaatcactttaaaacaaaatccatagtcacatatctacatatatttacataaatattcacatatttaaaggatatgcaatcaacttattctatactcctgccttttggttggactatacctacacctacttgcaaaaaaatgacaatgttgccaaaaaaaaaagctgttatcctccatagacagagaacccatggcagccttcctgctatgttccaaagtctaaggcaaaaagcttcgtgacaatggtattgagtggacactttattctttcggtttaaaggaaactgaaaaggcgtattattaaccccctgccattacgtggaaacgacctacaagagggcaagcgcgcatcttgcacttcaccgtggttgtaagaagggaaagcacagggatgtgcacttacggcgcacagacttgagcgccatgcactgggaagccaggcgtcccatcagccgggagacgaggagctgtaaatccagcccccaagacacggcaacatcgggcagcccacaggcagtgacagtgaatttgtagccccattcgttgtgactgctgtcagagtgaaagaggaactgcaaccgaggaccggccttgaaggtcactttctagagacaaacagaaatcatgtggtcagacagattagaggaggagtgcttcagaaatcagcatgctcttcatgacgagaaacatctcagtttaaaattgatctctatttccacatgtccaaaatgactaacggagaaatgtacaaaggggtgacggaaacagaccattcacagccacaccccatgaagaaggagagttggcagaatactgctgctcagctttctacacctggggtgaccatctgtccactaccgactcagccagtggtcacatttccatgcctctgctcctgccaagaccactgaccatggagagaaggtcaacagtctgaggcagtactaaacctccagcccaagagctcaagcagctctaactgtgaggcagactcttggcttccatcacatggtctgggccatcctcctagacccaccagcacttcttgctaaggatgaaggctcttcatttactctagacaacgctgtctgctgcaactactcaactctgccactgcagtgccaaagcagctataaatgataaacaggcatggctgtgttccaaaaaaatttgtttacaaaacaggtgacagactatagctggtcaaactctgatataaatccttcctttcacaaacgtgtaacataaatgcctcccttcaaagaccttacctctactgccccctgaaggctgacaaaaggaaaagcattggtgcagaagtaggtacctctttctgggactatcactcaccttgggccatttatcagtgccaacttttgtgtcatagcgtgttttccgacctctagcgtcggtaaattccagataatcatacctgtgaaggcataacctctattagcttccttctctcattgctgacctattagcgcttgggggtgaaagaatatagaagtcttaccttttttcagtttcacacctgtcatcgaattccacttcaaaataggttgcccctgggctaacaaagacggatacctcatggcaattattttcatagttgtgggcagattccttcgtccacgtatgtaacaccacaggctgttcctgttgccaggtctcaacatccagctatgataacaaatgagccaggggaaagaaaggttctatcactagacacctagccacatgcagcagactgtttctctatcagtgctccaggcagatggccttgacagccctgcacaaaccagcaggcaggctcgaagacaaacctgacattcccatcttcacacagatcaacacacgtccaccacgcagccgaggagatgtgcttttattacacacaaaaactccatgaccagcttgtaccttttcgctatgacagaactacttacaaatcattaccagtgtgaattcccagtggaaaaagtactgaatgaggagtttaaagacctcacattcctacctgggacactggcaaatctggatctactctcccttcctctcctacccttttcttttgagcggggggttgggggggggcctttggttttttacctgttaaatataaatgccttttctactgccacagagttgtgctctgtggcacacaaaagacacacaagaagaagctcacacaagacagtgattaaacgttatgtatgtataattaagtaagggagaaatttcttctaaagacaaaatgtaatttgcctttcaacatacattttctcttctagacttcaattttgtcactcacttacatggtttttatataacttcatcaactataaaatgatgagattcatctctacagctttttctgcgtctcctttcttttttttttttgagacggagtctcgctctgtggcccaggcgggagtgcagtggcgcaatctcggctcactgcaagctccgcctcccgggttcacgccattctcctgcctcagcctcccgagtagctgggactacaggcgcccaccatcacgcccggctaattttttttgtatttttagtagagacggggtttcaccgtgttagccaggatggtctcgatctcctgacctcgtgatccgcccgcctcggcctcccaaagtgctgggattacaagcgtgagccactgcgcccggcctctgcgtctcctttctaatgctgaccaggccacatcgacttggactgacattcacccttgttggcaagcccactgataaaatcaagggagccttctagaggctgctcagctgtgcctatctgcagtccgtggtccacttcactaagtgtgtcccatcactcctgagagagaacacggggcggctcaagtgctgactcgagttaccttcctcagtcctccttcggggccactacagagcttcttcaggagttctgtgaggacgctgaactctctcaagagcacgcagtgtgggatgtctaaagtgcagaagtccagcaggaagataacctaatggaagatggatgaagcactcagcgtccaccttaggctgggcctggggatgcagacccccaacccccttccggttctttacaaatagctgctagtttttcttaccagttgacgagctgccattgaaaacactgagttacataatctttctactatggtttttccactgtactgtgagaaaagggattccaaaatcgctctcatgcttgccagaaactggcccacatctaccgaaacaaagaaaataattaatatattatatagtagaaatgtcacatgcttggttatcaccacagacaagaataaagagactccagaagctgcagagggggttccacagcgaagaccacaaggccagcaagtgccgtcctaatgcattcctcctggaggaagaagcagtgcgaatttcagtacaagactcacttttaaagggatttttttttgtcttttgatgaagtagaggagcacttgtagaagtgaaattccatgcctgactaacccagctgtcagcctctccttttccttctgtttacaatgagcccgtgcattaggtgtaccaatctaacaggccaagctctaggtggcaggacccaatataagtgttttcgtcacagctgctgggaccaagtttgatggaactacattttccacgtataatttgtcagcacccgttgggtttcatataattttctgtgagtttacagaacatgaatctaattattctcggtaatcagcaatggtcacaatgctcatacaccttagatttctaaaattcaagactttcatttttagatgacttgattaaaacagggatagactctcctgaagagcgagacatcacgtaagagtgctatatgattgcaaaagcaatatttaggctgtgaaatgatctaattctacaataaaaatacttaggcataccaccacactcagagagtaaactctagacaaaaagacatgctgttgaattctattttaattagaccaaaccagtccaagaatctgaatcgtaatgaagaaagccatatgcacactcattgcatgagttactaaagaagagaacactcagagtcaaaacccaaacgccatctgttttcatggattttatattgaaactcacatttttcaataaggtccacggcaagatctttggctccagagtccgtgctcttcagctgcaggtagcaccaggatagcaggctgccttggacggaccagaacagggagaagagcacagagcccacctcccctggggccccactgagcattaacagctcgcactacaagggaggagacaaacagaaagtgttcgtgacaaggccattcacagagcatagccaagggcatcctctaaagcagcagctgtcaccagcaaaaacaaactatagccacggaaaagtcatgaaacagctttcaacccagcagtcaccaagaaagatggtattacgaaaactcccctttccctccagctttttggaacctttacaaaggttttttattccacatgacatctccttctaccacctcaggaaccttacccccctgggtatctcttctttctcttacatcttaaaatgtcctttctctggctccttccctcaagcctttaatcaaacctctcccaccttaaaaaaatcattattcatgcctccatggctctctaaccatcacctttgttctcaaaagtttctttgaagggttatctgacctccagatacggaagattgtacactatatgattccattacaggtacaacccaggcaatacagatgtgctgggtaggagtaagtagaaagaagaacaaggaaatggtgaacacaagcttcgggatgatggttacgcctggcaaggcaggaagagagtgagccatgaaaaggcatgtggatggagggaaatggactcaaagatactgggaatgtctagtccttaaaagagacacttgccacattgttgcaactacctgatgacatatttgctcctcaagactgtgcttttttaaaatcactgtatcccctgttcctagcacagggcctaacacacagcaggcattcagtggatatttgttgaatttgatagattcctgagaaaaatttcagaccaggtacatttctgatcacctttaattttttttcctgattgaaccctaactctttagtataaccataaatgtcttttactaaaagataattcagggaaacacattaatagctgcatctctagcaaggaggtttaatgatatctgtaacttcttttgtaccacaggtaagtgaaagagaagaaaagacacacaactgatctccaaatggtatatacaattatgcgaaattctcttgggcaaaatgctatctcatttctccacgtacatcttaaaataaatctggcctatcttatctagcagaaagaggacaaggctctgagtcaaacagccccggtttcagtcctggctctagcacctacccactcctcacgtgcggggcagaatcgactcctatgagaaccaggtgagaacgctgaagttttctgcccaatggcactgatgatgtaacaacagaagaaagactggtgagggggagaactcagttcaggcttcagggatctgagaaacaggtagaatgtagatgagctccagaagaaagggaaggtatgggaaatgcagaaataaggatggagattcgaatgagccatggctaactggggccgagaacacatactgatgagactgaagtgagttttttaaggaagactcagagatgggcagaagagtctggaaataagccagaaagcagaaagtaagagaaaattaatgtgacagcaaaaaatagagcatagttttttaattaaaaacaaagttgaggcttataaagtcaacgttaccctagatctaaattaatactagatctaaacagtggtcagcctaagagcaaccttggcaaatgataacctaggcaccctacaggtgctctgaggtccccatcagtgaattgggggagacacctgctgatggcctatcatgccaggcagctgggaatgaatgaaatcatggctctaacagcaactcaaaacagtaaggcacccgcaaaaatgtaagagatttaaagacactaagttcagtcaaaagatacaagataagttatcagccacaaaagaaaagttaccttcaagtccacatcattagatacctcaaagatgtggtttggactagtctaccacaaaatctcctccagctctctggttcccatatttagcccaaagagatagttcttggtttcctagtacaggggtgctatcactttagaatctctcggggtgcttagaaaaatgcaggttcttaagccctatccctagagatcttgaatcagtagcttagggtgggatctagaaatcttttttctgtcaaatatcccaagtgactgatccacttggagcataaactacattttaagaaagaaaatcccttatattttttaaaaaaggcaaatttaaaaaatcactaacacagaaaaaagataatatactttcagatttgattagtccacgaaattgctaagaaatctgaattttttttttgttttttgtttgtttgtttgtttgttttgagacagagtttcgctcgttgcccaggctggagtgctatggcgcgatcttggctcactacaacctccgcctcccaggttcaagcgattctcctgcctcagcctcccgagtagctgggattacaggcatgtgccaccacgcccagctaattttatatttttagtagaaagggaactaatttttaattaaaaattaaattagctcagctaattttgtatttttgtatttctccatgttagtcaggctggtcttgaactcccgacctcaggtgatccgcccaccttggcctcccaaagtgctgggattacaggcatgagccactgtgaccggtcctgaatttcttttttaaagtccaagtagttttcctgaaaattcacaccactaacacatatctgtgtgttgggctcactgacaaccactacaaggggacttgatataaatccattcctctttttccacaggaagcattatcgagcacttctgtgtttttatcgtttgctgactaccaagaaccgtaacatgccctcactcgtttgcaagggctggctgggaaacctttgtgatcatttgtaagagtcaagtaacaaagtacattcatgccaggcagagtggctcacacctataatcccaacactttgggaggccaaagtgggaggatttcttgattccaggagttcaagaccagcctgggcaacataagagagactccatctctacaaataatttaaaaattagctgggcgtggtggcgtgtgcctgtgtcccagctacttgggagactgaggtgggaggactgcttgggcctgggatggggaagctgcagtgagctgtgattgtgccactgcaccccagcccgggtgacagagcaagaccctatctcaaaacaacaacaacaacagaaaaaaccacaacaaagtacattcatactgcaaagaggcaaaggggggcacaagagactgccacatcacgtgcccccacaagcatgagacaaagaaaacagggaggcagccactggatacctctcgagcagcaacagagacgagagtgtccatgaccgccaggacttcactgatgttcatcttggccaggtcgttcttctcaggtaaaagaagaaggccgcctggatccttgtcactgaaaggatacaaattagtcatgacacctggcttcaggagaaagatttttatactattttaaaagattccaaaacagagcgcagaaaggtttcagtgtcatttccatgggatgggaggagtttgggtcaggaatacaggctgtggacccagctggggctgtgccgctgtctgtccacatgtgcttccattagcacagactcacaaatcctccagtcctggatgagaccctgaggtagaaggctgatgaataaatcaccttggccaccaatatgaaatacacctcatctcacgactgctagcttcaaagtcctggctaaacgttccttgtgtcttcacatgtcttcacaggacggccccaggccctttcagcatccttgctacttgattctgagcacattttaaacagacagccctctaagtctggcatccataccaggtatagtctgacttgcaggcagtcgctaaggatattagttcccttcctccttcaagagtcaatacttctagtaatgaagcctgtaggcccatttagcttctctggtagttgaaacaggcaaaaatctcgaagacctcccctcccagcacacttccttccacaaactatcattctgggcttctgtagctggttttaacgtgacacgaatacaagaccctacattcctttggcttcagtttttgttgttaaacattacttggaaactgaagtgttcaaaaagaccctcaacgggctcaatctgaaattgtcttaaaatggatgggaactggattgggctgtcaacaagattattattttaccactatttgggtcacccacagaaactcggctttctaactgagtggcaggaagtactacttcgaaggcacatgaaaggaagggcaagctcaagaaaacaactttgcaaagatttgagttatccgacaattaaaaagaacgatcagcttacctaaaatacgtgcacagtgaacggaaagtgagctgcagggactgcttgtgctcctgctcggtgacattcttctagaaaaccagaaattgtatattcagaaaatctagtccatgacattccagagacctagagcggcaatgaaacatcaccaccccactgttctcaagtatgaggaatgccaggccagcagactacctcacagcaccccactaaaacccgctcaagtactaagatggagcagaaccaaccatctaaatacaaggtggtaggtgcacttggttcactgccaaagtcaacagaaggttcaagtttcctgcttagggaaatgacctcataaagagatatactttttttttgagacggaatttcgctcttgttgcctgggctggagtgcaatggcgcgatctcagctcactacaacttctgccttccgcgttcaagcaattctcctgcctcagcctcccaagcatctaggattacaggagcccactaccacgcctggctaatttttgtatttttagtagagacggggtttcaccatgttggccaggctgctcttgaactcctgacctcaggtgatccacccacctctgcctcccaaagtgctgggattacaggcgtgagccaccgcacccagctgataatatactttttgccattggacaagccatctcaagagcaatcacagctcttaagggtatggtatccgaagatactgaggaggcacctgatggagagagaatcgctcagcactatacagaaggttggcagtgctatttaacttctcagcatgagaagacaccaatgtcattcaaaacgtcatgcgtcctgtttctactttctgtgtaggacacatgcttggaaattaatcatttgctcagctacctggtaaacacttgcaccaaacaagtaggatagagacccacccacagtccagtggctcaggtcagctgatgctgtcaaaggttatgtaactcacaatgtgagaagtgattcctcaggctgatatgcaaattttatatatagctggaattacacaaacaaatatccttcctcttctctgaaaccttcctcaatcacttagcctcaacatgattctcctcttgcatatggaataagtttttccttgcggcaggtgtccccaattagactgctgctgctgccctttgtcatcagggaccacattttatgcttttgttccttttttttttttttttttgagacggaatctcgctctgttgcccagggtgaagtgcagtggcgtgatctccgctcaccacaacctctgcctctcgggttcaagcaattctcctgcttcgacctcccgagtagctgggactacaggcatgtgccaccacgcccggcttccctcccttatttctataggcctttgtgcatcccatagaccacttttcttatgtctgctcattggctgttgcattagaaacgcctttttaaaatgctgtatctagtttcctttgtcaaattcttttaaataattctattagttgcttgactacacagacaataaaaagtaatctataatcatatcaaaacaaataaatatttgttttattctattatttttaacacttctttcccttgtcctacagcactagctaggccctccaatgcaacatcaaagagaagcaacgacagtaagcatccttgtcttattccgcattttgagaggaatgcttctagtgatccatcaaatacattgcttattgtgggttttcgatacatgccctctaccagattgaaggagtttctattttgagtttgctaatgaaaacatattgtttcattgttttaatcatcagaatttaatcttattaaaatattttctgcatttagtgatttttttttttcctctctgattccatttacatattttctactgctgaaccatcactggatttccagcataaatccaacttggccataattttgtttatatgttgttgcactggttaattaatatttcattagggttcttctaactatgttcataagtaagagtggcctataattttgctgtcttgtacacatttctctaatttgtccccttggtatacttacacttccctgtgttttaccatcattgtaacacaggaacctgtgaagttcctctacctaggtgtttttgatatggcctagagagaaaaagttttgttttgttttacattttttcatgtatcatactcattttcatacagaaatacttccttcagaaataaaaacctggatctttgtatagaatattccatttggtaacacagtgcttatagatactaaaagcatttttcaccccagctactaatgtctgaggaacacgaagaagtggtctaggagagtgacaagaaccatttaaggaataaaacttggtgatactggcctggcaagtggctcacgcctgtaatcccagcactttgggaggctgaggtgggccaatcacttgagccttgggcttcgagaccagcctgggcaatatggcaaaactcatctctacaaaaaatacaaaaattagccaggcgtggtggcatgcaccagtagtcccagctacttgggaggctgaggtgggaggattgcttgagcctgggagatagagaatgcagtgagttgtgattgcaccactgcactccagcctgggcaacagaacaagaacctatctaaaaacaaacaaacaaaaaaacttggtggtattagttttacagatatatactgaaatatttatgaatcaaatgtcaggaagttaccttgaaataataatggtcagtggggaaaggaggaaaggggggtgaggtacactgtaggtaaaacaagattagcgtgaatttatgactgttgaagctaggtgacaggtacatttgggggacaggggcattcactatactatttagttagctttggtatttgttttgaatttgcctataatacaaaggtaaaatgtggaaaagaaaggatggttgtaggcaagtcacaaagatgaaggagactacactgtcactttgtgagacatccgatcatgaaacacagattgggaatacgtgtcatcccactctgagtggagtgccatgtccttagatatctgtcccacacaaagctctgcatataatattaatacacatctgggacgttgcaacagacgatatattcagaggtaacaaagcctagcaaatttcatcctcacagacttcagacattgaatccagacttttagtaataattaccatcatggtgaagagatggttccgtcgggtctgtcgattaggaaagaagatggcagccccattgagaagggtattcctgacttcttgttttagtatctccatgggcacagagtctccatccaccttgtccaccactgataaaatgaacaatggcatcagctttcatatattccatctattcgcttatacatctgctataactagcctataaattcactactctccattttgtacttaataccagagtgaagaagtatttctgtacaggccaggcagtataaaaaaatattttttatttgctttcatttaactaaaacaaagaccgtatgtatcagtttttatgtcattacttccctgtccttttgagacacaacttggcaaagccttaaataaaacttcagaagcccacgtgtttcactccccctcaatctatcagcctcatctgagtgacttagttgaagttaaggctcaacagtatgatagtaatgactctcaacataacacagctatagatctgaaaccaggaggaagagaagtcagctgaggaaggaataaatcctgaactcaaactagtagctcaaaagagcatcaggggaaacactcgtttcccacagcggcaatccctttctgggggattcccacagcggcaatccctttctgggggattcccacagcggcaatccctttctgggggattcccacagcggcaatccctttctggctcgcatcatcgtaggacagccctcttctctatagcaagaggcccttcacgctacctacacagggttgtattaaagagaaaacccaaatccctaccatcacacaagtgtgtgtacagctccttggcagcctctactcctttagggctttggattggagccttttcctcctcagaagcagccagtacatctccctgcagcacagagaagcagctctggagtagctgcagaagcagggtttgggcagagacgcattcttccctcgggctacagaaagacaaaaaacatcagagagcaaaagggcaagttgcatttactctccaaagccatatagctgtctacaaaggactttcctctaggcatcaggctcgatgaaaataatgccaactgatgcaaactgagaggaagaagggtggaccagaaagaacactgtactaaatgtctggaaacagatcccatctgactctgcccactgtggggaaggaagttcatttctttttgttgttgttgttgagaccgagtctcactctgtctcccaggctggagtgcagtggtgtgatctcagctcactgcatctcagcctcccaggttcaagcaattcttccgcctcagcctcccaagtagctgagattacaggtgcccaccaccacacccagctaatttttgtatttttagtagagacggggtttcaccatattggccaggctggtctcgaactcctgaccttgtgatccacccgcctcagcctcccaaagtgctgggattacaggcgtgagccaccgcgcccaggcaggaagttcatttctgatcctactttttcatctgtaaaatgaggacagtactgtaatccttgacctgcttactactgcctaaatattttatagaaatctgaggtgttattttcaataataaccatatattttaaatcgaaccataaacactggtaggaagtaaaaaaaaaattaggaaaaaaatccacttagaatagtaaaactcattgttttcagtttatgtgcttatcaccttataacaaattctgacctacttttgctttaatttactgtaaaaattccagaagatctgcaaatcaagacccgcgaagtccagaaaagatttatattttaagccactttccttctgctgcacctaaaaaattataaagatcagaataaataaaactgaaaaatgcatttagagaaatactgtaatgcctcatttacttctaattgtaaagggatgaggtggctctacatgagtgagactttcatattactgatgcttactcttaactacaaaaaggtttgccaacaactatttttggtttgaaactttctaaaatatatgtgtgtgttatatgtatgtatgtatgtaagtgtatatagatatatacacacaacacacacacacacacacacacacacacacacacacacacacatccatgaacgctcctgacttcctaacccagcacataagccagtctttcctggatgatcactgtccaggactgtactacaatatactgacgccttccccgtgcatggactgaaaggtatcaatccttccgtaagcatgcctgttatttccaggcttctccttcttatttgctcttttctactgtgataggaggtctgaataacgaagaccaaacaaaccttatatgaactgagtcaccagcctctgaatgtgccctgaagcagaatggggatcaagagtggacactgctatacactacacatgcgagggctccacccactgaactcccgaggctatggtgatggctgtaagaatcttcctttgagtgagttgtcactgtgttatattactgactgtaagagtcagtatcaaaaaagttagaaatcaaaaaatcatttttgattcgaaatcctgccattattttcgtattttcagtaaataatgaaaattcacctagacctcagttataattcttctaggacttaaagaagatgcaaatcccatgaactctgttctgtttgtttccccatggcagccacggccagggctcttgaagatgtgtctgtaggtctactccgggagaagccacaatgatggccacaggccactcactgactcacaggccacttccctgactcatgccatgaatgcccaacagctcactttcctcagcttttcatgtccctgcagcagtacaatgcccatcctattggcttccgcaggggcaggttttatcagttggtgttcatttctctgaatactgtcattcacttttcctaaaggaatgccgtctaacaactgaggaagccctaccaggtcatgggcgagctgctggataaactgaagggtcctgaggagcaacgtggccccacagacactctcctctgtgtcctttctgcagtgtgcacaggtgacgctctgttctgcttctgctcttgcaggccggaggtacccactgatggtcaagccttgcactcccaagcgctctgctgactcctgacgggtgcagaggaacttcaccatcaaatactggacaggacaagagagatttcaatagaagaactcagaatccctgaatattgattaaagagggaaaaaggcctttccgggaaggtcttcctatgattttcgtaatttattaggaaacattatgctcagcactagggacacaaaatataagtccagcatttacagtacagagaaaaaaaagacaatacaaatgttgaataaagtcaggtttgggtagattacagtaaggaaaattgcatcattactccctcttggaggcaaaaaccagaatagaggatgaagaaaagtacatttgctctgtggcagtcattttgaaacagaaatcagatataagacgaaaacagtcaatgccctccacctcaaagcccccaagtgatataggcaacccctaagctagaaacccaggaaaacagtcctgtctactcaaatctagggccattttccaaacccaactttcatgcaaactacctgcttcttatggtgagcgctctttgttaagggcctttcagaatacactactcaactgcgtaaatatttaccgagcacctactattacgtgcccttaagagagttcctaattacttatttaagcctgagatttacatccaaggtttagcaaaaaattaagcagccaaataatgattggtcctttctatggaaagacacctctcttgagttgatgcctgtgttctcactattctctcagcctgaggtgccctcctccacacactgtagcatggctaaggatgctgtgttctcactattctctcagcctgaggcgccctcctccacacactgtagcctggctaaggatgctgtgttctcactattctctcagcctgaggcgccctcctccacacactgtagcctggctaaggatgctgtgttctcaactattctctcagcctgagacgccctcctccacacactgcagcctggctaaggatgctgtgttctcaactattctctcagcctgagacgccctcctccacacactgcagcctggctaaggatgctgtgttctcaactattctctcagcctgagacgccctcctccacacactgcagcctggctaaggatgctgtgttctcaactattctctcagcctgagacgccctcctccacacactgcagcctggctaaggatgctgtgttctcaactattctctcagcctgagacgccctcctccacacactgcagcctggctaaggatgctgtgttctcaactattctgtcagcctgagacgccctcctccacacactgtagcctggctaaggatgctgtgttctcaactattctctcagcctgagacgccctcctccacacactgcagcctggctaaggatgctgtgttctcactattctctcagcctgaggcgccctcctccacacactgtagcctggctaaggatgctgtgttctcactattctctcagcctgaggtgccctcctccacacactgtagcctggctaaggatgctgtgttctcaactattctctcagcctgagacgccctcctccacacactgtagcctggctaaggatgacaacttaatcttcaacatttgacatcacaccacccttcctgagaagctttcgagttacatatttttcccctggttgccaacagctctctgtctctccttttatcacagctcgtatcacactgtcttacacatctgtctctcccacagagtatgaactccctgaaggtagattcgcctctggggttgtagcattggcacagggctgatacacaatcactactcaaaaaacacagaataaaaggaggggagtgggcaaacgacgcactaatgcttactttggcaactctgcactgttgcagcttcacatctgcttcatcccattcttcttccagttcaaaccagccaataggatcatcctctccaaggtcatcagatgagcaaccaatcctgtaaagacaagagtattcacaaaacattttattttgaaacttctcaagggtctaacaaataaggtatcatctaagtgacatgtaacttgtatctgtagcctgtcagtgaacaatcgagagctgactatggtacatggtaccctgtgagcacatgagacagttggtagtattgcctttccattgctcagtctccttctctatgaactgggaaatataatctgggaactaaggagaaagtttgcttctctaattggctcatctgaagaatgagacagaaagtcgggcattgtggatgactcaggagtaaggtccaatgcaacagctggcatgtgcttctggaaagtgccagaaaagaggcaggcttggttttctttccctaggtctggctaacatgtttatgaccaacctgaggtttgggccacttgcaatagctgatgggtaaacatctgagggctttcagatcctggaggtccaaaaaaacaaaaaccccagccttcgtaggcctcagtattcttgtctgtttcttaagaagttctttcagaaaaacattccagccttgaggctgaagagatgtcttctcttctttttaagagaatgtatgccacttctttttaaaagctgaacacttaaatgctactcccttttcaggaattaagtaactaagatgtgctgggcacgatggctcacacctataagcactttaggaggttgaggtggatggatcacttgaggtcaggagtttgagaccagcctggtaaacatggcgaaccctgtctctactaaacatacaaaaaattagccaggcgtggtggtgcacacctgtaatctcagctactcaggaggctgaggcaggggaatcacttgaacccaagaggtggaggttgcagtgaactgagatcacgccattgcactccagcctgggtgacagagcaaggctccatctcaaaaaaatataaaaataaggccgggcacggtggctcacacctgtaatcccagcactttgggaggctgaggcaggcagagcacctgaggtcaggaattcgagaccagcctgaccaacattaagaaactctgtctctactaaaaatacaaaattagccaggcgtggtggtgcatgcctgtaatcccagctactcgggaggctcaggcaggggaattgcttgaacccaggaggcggaggttgcggtgagccaagatcgtgccactgcactccagcctgggcaacaagagcgaaactccacctcaaaaaaaaaaaaaataataaaaataatataaataaataagaaggagaaaaagagcagttttttcaagtaacattcctaaaactttacactattcagtctgtgatatatagccaccaagctggcgacacattagtattttatataggtaaaactaccaaaaagagggaattatggcaagaagacaatcccgagtaggttctgtaacagagagaaaacatgtccctttttttttttttttttgagatggagtcttgctctgtcgcccaggctgcaatgcagtggcacaatcttggctcactgcaacctccacctcccaggttcaaaagattcacctgcctcagcttcccaagcagctgggattacaggtgcctgccaccacacctggctaatttttttgtatttttagtatagatggggtttcaccatcttggccaggctggtttctgacctcaagtcctgacctcaagtgatccacccgcctcggccttccaaagtgcgctaggattacaggtgtgagccactgtgcccggcaaaatgtcccttcttaacataagtctttcttggcataaacctttcatgacacagttaaccctaatgggaaacggtattctcttaagccaaaaccatgtcaatgagtttcatcaatatcataagcttaaagattttttaatctactctttgggagttgtcaaggaaatcttcgagatacagaaagctggcagggtatcagagaacagagagaagcaatcttgttccctacactgcactacatagtaggcaagatggaagacagatgaatcctagtcctctgacgtaggcacagcaccaactgctgaccctggagcatgctgactgacgaacgcctgaccaggaggacatgaccaaaaaaaaaaaaaaggcaaaaagaaaatgcatgcacattaatattttgatttccaaactggagagggactggtgaatatgtaggccaacaaaatcacgatttaagagtcattcaggctggaatcaggagctaaaatcattaagggagtggtgaataggcctctatttaggttaaaaaaaaatcatcctgtataagatgtaaaagaccttgtttaacagcaggtttaggggaaatgacccattttaatttgtcccaagagtaggacatagctgcctaaaacccagtgtcatctctagttattactttaaaagaaaagcagtgtttaaaaaggcatacacgtgtaacggaagggagattttaggagtgaaagacatttgttcaaattcattaaagggctgaaacgaagaccactgaagagacattacaaatgtggatttcaactgaacaaattctgattactgaagtgcctgatacgtggtgagttttccatcaacggtattgtagagaggctgaccgaacctttgccaggaatgctgctaaaggaattgcagcaagaagagcgaattattcgaattattctagatccttacgatttcaagtatggtccacagacaggtagcatcagaatctcccgagagcctgtaagaaatcagtctcagaccccacccagagctcctgaatcagaatgtgcattttcacaaattccctggctgatgtgtatgcacactaaagctcaaggagtactgcagtggatggtactgaaaggcttctattaacaccagcaatccactacccatgaaataatgcaggcaagttcagggtttcagctccttgagtatttttttttcttgtcttagcttcttcaattttaactcactagtagcaataggggaggtaaccttatccaagggggcaccagtggctacatccgacagatccacttttagactttaccttctgacttctgggtaacatctgacaccatcgcccattccctcaaacattattttcccttggcttcatgggacacagctttccttcatgaggccctggctttcctgctgcttgtctggctgagttttccttgttgccccttaaagcctggtgtgtctcatgttgacctaagttctcttctcttcccagttcacacactcttgcagaatgatctcttccacttctacattttatttatttatttttgaggcaggatctcactctgtcacccaggcaggagtgcagtggcgtgaagacagttcactgcagcctcaacctccggggctcaagggatcctcccgcctcagtcttccaagtagctgggactacaggcgcgtgataccatggccagctaatttttatgtttttcttttttttttagagatgggggtctcactatgttgctcaggctggtctcaatcccctgggctcaaaatccacctatcttggcctaccaaaatgctgggattacatgcatgagccaccacacttggcctatttctacattttaaattatcgtttaaatgcctctcatatctgtaccttcagcacaaacttctcttcctggctcctgacctgtttatccattggctaccgattatccattggctaccgaacacctcaaaggtttctcagaacttcaaattcaacagaacaaaatctgagctcatcatcttccccacaaacctgtttttccccagagtaagaaaggcactaccaatttccccacctgctcaagccaaaagccaggattcactgccgatgaggcttttttccctctcctgctccacattcagtcaatcaccaggtcctgtcgcttctccctcctagtggtctcttggtccacatctctgcactgctgctgctgctctagtaggagtcacccactggcttcctaggcaataagtgacaacctcctcccagcccagctgcctccagacttgctctcctccagtccatactacacacaacatgatcctgaccagtgcttctacaacatgcatttgagccccctgcttttctggaaatgcctcaacacattcccctgccatttcccctcacatgatgctttaaggatacagaaacagagacaaagccctgaatgccctgccctttcccagctctccagctgcatctctcatcaccctccctccgagtatccctcagcaatgcgggacctgcccgttccttcaatgtgccatgcttcacctctgggcccatgaagctgccctctctgcttaggacattctccttccagtggccgatcaactccaactcatccttcataaacagcataacaacacttgctccagaaagatgtctctgatcaggagggccgctctgccctgtgtccccacagcgccctttctcccctacagcacattcataacactgttgatactgcaagttttcttacctgtcttctgagctaaacagtaagctatataaagcaagaactgtgccaatttcctcattacggtatcttcagcacctagcatcaggcctggcacacagtaggtacttaataagtatttgtgttaaaagcaggaatgggagaaggggggttggggcaatggctaaagactgcaggctgtccacaattcaggcatagatagatcattacccagccattgtgaagatgtgtgcccctggccacaaaagggactgagtaacatgctatgaacaaattaacatacacatcttcagatatgctactagaaagcaatgaaggcttatggccactgagatggattagtggcgccttttctataaagacaagcaagcacagttcaccaatgagcatgaatacattcttattaactacaaagatttttgttctgtagatctttgttctacaaagattttttaccttcttacctgctttttacaaattgcctgagctcctgaagcttccatttgtcatatttttcaaaccttttgaagtgttcttccgcacaaaatttatctgaagatgagttataggcaaacaccaacccacactgggcaccaatgccaccacgtcgaacctggaaacagagattaggatgaagtctatcaaaggggcaaaagttctgtggccgttttgtttccagcatggttaaattcaaacaggttaaaacaaaacgagaccaatgaaaaatatttcaaacatattaagccctcaaaaaataagaaagctgtttcccaagaaatgttccttaactttctcaatccttatattctcaccatttcaaagactttacagtctatccatctttgtgtccctgccctctgctacaggcctgacacagagtaaatcatcattaaatgttcaatgaataaccaatgacatggtcagccataggtctgactttaaaaaaaaaaaccaaaacaccaatgacgtggacttctgaaatgtaataaaaggtaatattcaataataacctaattgtacatggaaaagtaactacaacagtgtaatggattgtttataacacaaagactaaatgcctgaggggatgaatagctcatcctcatcctctgtatgattatttcacattgcatgcctgtatcaaaacacctcatgtaccccacaaatatatatacctactatgtacccataaaaattgaaaacaaaagtagtaacattgcttaaagaaggtagcacgaaaattaccataattcttatctgtgtaacttggaaggcagattcagttccggtagaaaaaatagtgctggctctggtttttccagtttccgtaagaaaacctgaaaaaagggaaaactcaagttagggaactaacccatttttatagccctaagaactaagatcaacaaaaacaaaccatatcctttgagtcatggggggtaactggtctgatatcttcacgaaaattagagaaaaatgtcctctttggacagaggcaaccccgatgataaagccccaggtaagcagagaactgaccaggttcaactttcccagggcacaatcccctccacctcacaggcagccctgctctgaggtaacaataagaaaataaatgtttaggccgggcacagtggctcacgtctgtaatcccagcactttgggaggccgaggcgggtggatcacgagatcaggagacggagaccatcctggctaacacggagaaaccccgtctctactaaaaatacaaaaaattatccaggtgtggtggcgggcgcctgtagtcccacctactcgggaggctgagacaggagaatggcgtgaacccgggaggcggagcttggagattgtgccactgcactccagcctgggcaacagagtgaaactccgtctcaaaaaaaaaaaagaaaaagaaaaagaaaaagaaaagaaatgtttataaaacatttaagccaaagcgacaaaagactggacaatcaatcatcttcctgagccacacctacaaccatggctgatggctgcctgggctgataaagcctactggcttagtggctgagaaagggattagttagcttctacaacactttgtcaggaaaggttatgaaaggctttgaaatgggaaaaaaaaaaaaaaaaaaaaaaaagaatcactgggtgtcctagccaacataccctttcggtcgtctctgccttttatggtctctaaactattttacaattctgtaagttgtagaacactggtagtgatgcacatgattcttgtccacagaactaaacactgtgttctgtggaaatgttgctgattattccttatggatactgaccaacattctatctatttgtaaattaattttagcattcttgttagtctacatgtattttatgaattctccttagaactgtttgtaacatcttactggttccctcattaattaatgagctaaataaaaagtctgggccaggcacagtagctcatgcctgtaatcccagcactttgggaggctgaggccagtggatcacttgagcctcaaaaccagcctgggcagcacagtgagaccccatttctaccaaaaaaaaaaaaaaaaaaagcaaaaatcaaggtgggtgtggtggctcacacctataatcccagcactttgggaggctgaggcaggcagttcacttaaggtcaggagttcgagacgagcctggccaacatggtgaaaaccccatctttactaaaaacacaaaattcgccgggcgtggtggcacacacctgtaatcccagctactcaggaggatgagacaggagaatcgcttgaacccgggaggcggaggatgcagtaagctgagatctcaccattgcactccagccggcctgggtgacagagtgagactccaactcaaaaaaaaaaaaaaaaaaaaatcagctgggcacggtggtgcacacctgcaatcctagctacttgggaggccagggtgggaggatcgcttgagcctgggaggtggaggttgcagtgagctatcatcacaacacttcactccagtctgggcagtagagtgagaccctgtctcaaatgaatgaatgaatgaataaataaattaaagtaaataaattaaaagtatgaatgtgttcacttatatttgtatgacagtcactattttccttttttgattgttggtaattatcctttaacaactcatgaaaaagtcttctgctagacccaaggttgcctttctctttcaaacgtctctaaatgatataactcagcaataaataagcttttttttctgggactctgaattttcttaacaattctgcctatcaaaatgacaagactaaaaccaatttcatgcttcctgtttcattacatggagttcaagccaacaaaaatttataaagacaatgtgcaaaatgagtcaccaaaactaagaaaattaaatccaaaggaaacttctctaattcacacagacgctctatgatctagttctatgaaagagcaattctataggcaattttaagaatccatactaccaacaattcacacaactccactaacagtaatactaagaactatcccaattattgaactcttaccttttcccagagccctggatgtctctatgtaaaagaaatctatgtaaaggctaaactattgtctaaaagttaagtgataaatcagcaattttagttagtctcaatgtagtagcagaagcaataatttaagtcaacagaatcggatagactcttttaaaataacactgccaccaaatatgcaatgacattttttcagaaaggcaaaacaaaaacaaaaccttaaaaaaaaaaataaaacttctgtgcttccttttcttggtaagaaatcagctcacgtggtttttttcatttttctcttttgttttttagacacagggtctcgctctgttgcccaggctggagtgcagtggtacaatcataactcactgcgaccttacactcctgggctcaaacaatcctcctgcctcagcctaagtaggcccacaggcaaacaccaccatgcccagctaattttttatttcattttttgtagtgactggatctcactatgttacccaggatggtctcaaactgttggcctcaggaaatcctcccacctctgcctcccaaagtgtcggggttacaggcatgagccactgtgtccagcctagctcacaggtttgactgtgatttttttttttttttttttgagacagagttttgctcttgtcacccaggtgggagtgcaatggcgcaatctcagctcactgcaacctccgcctcccgggttcaagcaattctcctgcctcagcctcccaagtagctgggactacaagtgcctgccaccatgcctggctaatttttgtactgttagtagagatggggtttcaccatgttggccaggctggtctcgaactcctgacctcaggtgatctgcctgcttcggcctcccaaattgctgggattacaggtgtgagccactgcacccagctgaactgtgatattttaaatctataagttttgacaccctgccctccacttgccaatttattctttttagataacagggaaaaaaaaaataaccaatcagatttaaaggacttaataaatctaccacttctgctcctatcaggagcacccagtattcctttaaaataccagaccaagtgacagtggtgactgccaggaacgttagccccctgaagtatcagcgtttgagttctctgggcattctgtgggccctgcagtggcacttgtccaaaagtggtacttccccactgttggagaatcagacgtgtacccatgagaagagcttttactccgataaggggaagaaaaaatcacccccaaacccaacagctctggccatgagtactttcctcttgtcttgtcccttaagggttactttttgcagtgcagcaagagagaccgacatcaaccctgagttacaagcaatagatagtgatggctggagggagtgagcaggaggaacccagtgctccccacacccattcacatcccacccttgtgtttctcaggcacatggcaaaaataacaaatccacaaactacagctagatttttaaaatccactcaatctaaggaggggaaaaagcaggaaggagaactgggtaggtaaaagacacagggaaaataacaaaatattcaaatcagaccaggcacaagagctggcaaaatctattaccaggagaaatgcccgtgaacaatgttaaaaatccacatccagccgggcacggtggctcacgaggtcaggagatcgagaccatcctggctaacgtggtgaaaccccgtctctactaaaaatacaagaaattagccgggcgtggtggcgggcgcctgtagtctcagatactcggaaggctgaggcagaagaatggcttgaacccgggaggaggaggttgcagtgagccaagatcataccactgcactccagcctgggcgatagagtgagacttcgtctcaaaaaaatataaaaataaagaaataaaaaatccacttcctcacatgctccaggaacaaaaattccaaatcttcagcaagtgaaggaaaaatgcagagggcctttggcagggtggtcttggctttcttgggtgaggggaagggaaagggacaaggagctaacaccaccccctcccagccccacccactttggatggcaggagcctcacagccagccatggccttcagtgtggctggagatggatgtggtaaagaaaaacgtttctgcacaggctgagctgctcagggaaaaccacagggaaacaatctgctttaagcatctactgctgaagaggagcactgaggagaggaggtgcagctgggaaaagcatgttctcctagggtctggactccatgagtgctgagaacgaatacaggaaacgggacagagaagaggcaaccactgagaacatacgaggactcattgctgagaggaaagccgaggagaaccagacgcaaagcagcaaggctagtccctttcaatgtctgatcactgctggaacattccacttcctctagtgaatcagcaagattcaaatcagtccagtgaggaaaaaagggacacagaggacaataacaaggcggccaacaagacgaatgagagactcacaaacaccttatcacgagataaggaaagagcctccagcaaagttgaaaagcacatcagcaattattatgttgacactaggaaaagagtgaggcttcctctagacacgcaaatactacatcagctatatctggaaatacccttctttgttttgttttgtttttttgaaacagagtctcgctctgtcacccaggctggaaggcagtggcgggatctcagttcactgcaacctcaacctcccgggttcaagtgattctcatgcctcagcctcccaagtagctggaattacaggtgccctgccaccacaacagctaatttttgtagtttttttattagggatggggtttcaccatgttggccaggcttgtcttgaactcctggcctcaagtgatcctcccacctcggcctcccaaagcgctgggattacaggtgtgagccactgcacccggcctggaaatacccttcttaaactatgttttcagtcagtagtaaagtgctactgatctgctgagtttcctaccacctgaagataacacaatagaaagacaattggaactgaaaaaacgattaaaaaaaatagtaactttttatattccaagagaaagaatccttgcttttcaaaacttcaggctctcaaatacttctgagttgttatagtcattgacacctaggcagattacaactacaccacacaaattgctcagcaaccactgccaactgagaaacaacctaaaattgaagactgcacgcctcaaacatttcaaagtctggagtgtgctttcacacagctgactcctgtctaccgagcacactagaaacagacagacccaccactcaccatcccttgtccacggttcaacaaggaggttttcgggtccagacttatcttcttttcctttgacatcacatgcctgaagagtcaactggagaggtttacctgaccaaagaaaaggaagaccaagctgtaagctaaaatatgaagaactggaaactagcatgcctatctgtggaaatagagtcctgtggctacccagactgctaactaaaaatctccctgtttaaaagctgaaatagagcagtaatatcagacaaaagttgacaccatccctttgtactttcctgaaagagacaaagtacagctatggccctgagtgattccaaggacagctttctagaacaatcattgttctgaaaaaaggacattataagacataggttgataacatagattgaacacatttgggggggtgattcctaagatactgttttggagccaataattaactttattacaattgcatttaaatataaaatattttaggtctcgtttctttaaatcatctctgcaggcaaaatttctgtttcaagaattagaaaaatcaactttttcagaacacttggctttggcaaaaaaaaatatatatttatatatacatataaatcaacttttgctatgatgatctgaaaatgttttccttttgttttaataatagaatgtacacctgttcacctatgatatgacctagaactagaacattaccccattccttcctatccactgctccctgcctgaacaaccattaatctaaattctattcagcttccagacactacctgctatcccttctatccagccatggctgctctgggctgttgaccagtgcaacccccaaccacccaagaaaataacctttcaaaatttagggaggaaactagatttacaggacaccaattgtctaacttaaaaatttaaacaggcaaaagaaaaaaaaaattaaacaggctgggcatcatggctcatgcctgtaaattccagcactttgggaggctgaggtgggagtactgcttgagtccaggagtttgagaccagcctggtcaacatggggagagctcatttctaaaaaaaaaaaaatttttaactagccaggtgtggtgacccatgcctatagtcccagctactcaggaggctgaggcaagaggatcacctgaacctgggaggtggacgctgcagtgggctcagattatgccagtgcactccaacctggatgacagagcaggactctgtctcaaaaaataaataaataaaaataaaaataaacataaaaagaagccattaagtcagtcacactaagacgaaggtagaaacctcacggcagaagccaggtgtggtggctcacgcctgcagtcccaggattttaagaggccaaggtgggaggactgcttcagcctaggagttcaagaccagcttgggcaacatagtgagacccaatctctacaaaaaatttttaaaaattaaccaggtatgctggcatgcacctgtggtcccaggtactcgggagagtgacacaggaggatcacttgagcctgggaggtcaaggctgcagtgagccgtgatcatgccactgcactccaatctgtgcaacacagcaagacactctctctcaaaataaataaaagggtagaaatgtcactggaatactgccaacaggatgagacccaacaccacatattgtggagtccaggaaggctgcactcacaagtagaagtgctgcactgcagtcttttgggagtgactttatgggctcccatgttgagaaggattataaggccccatcctggtttggtagaaaagtgctcatatgaattactgctaggcccaaggggggaaagcagtggcagacaggtgtccaaatccttcagagcagctatcacgggaatgcagaggaatgcattctaagacaaagatccctttgcaccgtatcttggctagtttcctccctccaacaggtaagaactactccaaccctcttggcctacacaatgagacacttcagtacttcaccaaagatggctgtgttcaaatggccaccagacctgagtaattttgcaagcagatcatgggagtatagccttgtggacaatcaagtgtcctcttctggtgatactgccatcacataaatgaacctaaatcccccttctccctgccaatcctagtaaggtctgatactcagaggatacgttcatccaggaatcatggtgtaactataacaacccaaaaagatgagaagataccaggaggtcatatggcgaagaatggttttacgatttgtccactgttgacatttctatcacccccatgttttaccatatttaccatatttgaggagcaggttctgtctgactgacgccatggacaagatgagggatgaggcatcatactgcgtgtccagatggtcagtgatggtgcatagagagctcatgactttggcaacacttcctcttgcgagagcaaaagccagaagagtcagttctacctctggggtagaacagcagctataagcaaagagcaaaaacttttcacttcttaaaaacatgaaaaaatccaggtagctcaaaccccatgtaagtgatcaacacaagtaacattaacctgccatatgctttctacaggtttatccgaaatatttttcaaaatccttaaggtaacctaaggaaaaattaaatcaatccagagagccagggaatgaaagcctcacttctataatctttaatctttaaatattaaataataccaatacgctactgtaataagcctctgctattaagaagccttgggtaatgagctggcttgaccagagagttgagggtttatgcttgaagcactaaaaatgtatcacactgaattacacttctttgcttttaatttaaacacattatactgaaacgttaaaaactgtctagatggctcagggactggtttgacctctaatgcaataatgtcctcagggctcactgaggcagaagtgagtgtccctacacaaagtggtcactgctatcaagctatccaggtgccctttcccagttctgtaggtaatcaggctccctggacctgcatgtgaaggtcagcaggttctgagtgagggaaggctatgccagttggactttgagacatctgttctatcagaatcacaggactactccccttgggccctgcaacacccctcaccaaccttcccaattcttcaggtcaggtgatactgctaaatagtggactttagatgagtgaactattatgtcactttctctttagctgctaaaaagcaaccatttttagtggtgatcgttaaaagattaatatatattttttaaagacttaacaagcatacgtgcactccattcctcacagagtttaccctcatcagccttgattttacctagttatccttatgaggaaactgtccacttcttccagcacattaggggagaggaaagttgagaaatctgtagatcctggtgagagagagagtggaggcatgtgccgcagcgccttcctagaagaggaaaatgtaaaatgtaatcagaacaaaaccagaccgaatttagacaaaaaataaactgttagaagcttgttttgactaatcccttataaacagacagtgttcccacagagaagctggcacacaatataaactggcccttctttttttttgagacggagtctcgctctatcacccaggctagagtgcagtggtgcgatctcggctcactgcaacctccacctcccaggttcaagcgattctcctgcctcagcttcctgagtagctaggattacaggagcccgccaccacgcttgactaatttgtatttttagtagagacagggtttcaccatcttggccaggctgggcttgaactcctgacctcgtgatccacctacctcgtcctcccacagtgctatgattacaggtgtaagccaccgtgcccagcctaaactatccctttttgcccaggagtcacagtgctaagtagtttaatagggttttgtgtttgtttgtttctttctttcttttaggagttctgcctccctctgttgaataaaacttattcaactctctagaatccagctttcatgttaagtagtactagaaaaactgacccaagaggcagagcagcttgaggctcagtagaaaatttattttataatttgttcagcagcaacagggaaaaaaaaaaaacaaaagaaaattttatagctaggatctgaagatctatggtatctaaagatgtgccatgaatgttatgttctcttaaacagattagcacatcaccgtctccattcctgccatgtttcttggcctttccaccttaatgtctgttttagtgtttcccttttcttgtctttgcttacatttatctttctgaatcccccaatagctttacctactctagattagcagtcatcaaaaatttacgcaacaaatgacttctgagccctactgtgtgccagcaactgtgctaggtgactgaatgtaccatgaaaaatttcaaggtattctgtgaatgtatcaaaagtaactcaaaattctacaactgatagtcgcttaatgataatggtaatgaaaatccctgaaacaatttcatttctacatttcaaaatagagacaataaagcaaagcaaacactgtcagctcgcactctgccctagttctgttcctgtctacacaatgagccattttggggttgcacaaacatggcagctacacacagatgcagctgatcagtgaggtttaatgcacacaagtagcatgcgatcatttactgaatttatttccactgatacaggcaacacttctgtcccaaaatattcttttccttacctatttttcctcattgatattttttcaataaatctttaattttaaaatagatttagatcactaatcttaaaaaggcaggagtgcatgaaaatatcattgcagatgaactagtaaaactgagcagggacacagactttaaaatctgtccattcttcaaccacttgccacatcttcaaaaaaaatatagaaacctcttccttttcctgaaaatccagtccacaagatgggactgtgcagtgcagacatttgtatgtgtctggggagtaagggggagtcgtcatggtggcctacagtgaggttttagagcctgagcagggtgagaaaggtgtcttcacaaaggtacggcctgatatggaatgcaggcaccaagtgaggcaagaagggtggcctggcacagggtataggaactcgaggaagataagaagggcatctgtgcaaggatggccacagcagcagctctgcaaaagatgctggagcaggaatgggatagggagggtgtccatgcaagggcaggggcaatgggacactggttacatagaggcgaactgagtaagtacaaaaaatgtattaaggatcatgggaagcaagtttcttagtatcagagaaggcagtcacaaataaagaaataggctgggcatggtggctcatgcctgtaatctctgcactttgggagaccgaggtgggtggatctccacctaaagagcccctgattcagaaaaatggctgattccaggactaatgcagggaacattcaagataagcctggaatatcttgtgtcagaacatatggaagcattccgagaataatgagacatgtcaaaaggacacacaagccagactgcaggggttgccaccagccaactccaggataacataagcatcaaaactgtggctgactataatctagtgcataaaagaggaatccactaacataaagttttgatgaggaatacgatatttacatagtctcaaagtaccgccttcaacgtatttattaattatgaagtgaaaaatatttattttacaatggaaaagtctggcaaaaaccactttaatcaagtgatcaaagttaacaagactgcattagaatgaggactatctgaagttgtgtgcaacccaatgggatgcaatgagaacaaagcatcacttctatgatattcctgctagagacagataacaaaacctcaatctgatcacaataaaacatcaaataaaccagaattgaaggacactcttcaaaataactgacctgtaattttcaaaagtatcagggtcaaggaaatactgaggaaagtcaaggaaatactgaggaattgtttcagaatgaaggaaactaaagagaaaggacaaagaaatgcagagtgtttcgctggatccttttgctgtaaggggcgtgactggggcaacgtgcaaaacttgcagggagtctgaggatgagatggtggcaacatagcaatgtacaccaatgtggatttcctgatttcaatggttgtcagtaaatgttcttgtttacaggaaatacacactaaagcagcaggaacgatggggcacaggcaggcaaattactctctaatgactgaggaagaaataaaaattatttgttaaatgtaaacttgcagtgcttctctaagtatgaaataatttagtgagaatacatgctacaacaggaagaaagaacaaggtatggccaactattaaccttcagagcagcagtgttatttgctaacagttttactcaatagtgctaacaaatctcaaaagatgtctagagaacaaaatattagcaatctctttttggctgatactctcaccgcctacactataggtacctattatcagttactgaatctgcacaatactaatatttcagtgctgctatagctggttgtatttgtcttatatgttactatttggtctttttgccctaatgattttttttcaaaagtactctacatttcaaaagaaattaatttagtaccctgaaaagatttcactcattcgtggaaagagccctcaactgatccattactgcagcctggtcttgtgacttcaggaaaggtcacaacatctgcgtctataaaatggggtgattttcacaggtacacttcagtgtcagtaggtaaaataatagactgcatctgaaagggctttatccaacatcaaatcctatagaaacatgagcaattacttcccaatggacaaggaacaggcacagcataagtgacctcctcacaagactggtccacttagtgagctgatgaagaacactgtaggaactgtgtgacgaggagcaggaaggtggaatgggcactttttcagtctgtaaagtcagaacgtcaatcaaagagagatacactgtggagctgagtggcacgaacaggaaacactagggcacctgaggccgagctgactgagccacaacgatcaatgatggaaggctgctcagtgatacgccctaaaggatgatgggagaatgagggcatgttgagggggctggaacatagagagaatgacttactgagtattgtgcagcactgtctggacaaaggcgggatttgtctccatagaagccgtcaccagagatgtcagcagagaccaataccatattgcagaagcatctgagactgagaccccagacttcttaactctctgaaagccaacagccctgagaccatgaattctagtgtcgcagccatcgctaagacaacgctttatgttaatctggacatctgtcgagcacaaacaaaaaattcagtattggattaacttctttaggcaaatgctgggctcccaactaaaagcaaaatagtaatagacattttgaaaagaaaattctgaaggtacactttgatgacagaaataaatagcatgtgcaatggaactagtatataataaatttgtcaaaaagctttgacaaatctaagaaatcataagaataatatgtaaaattaagggtgatttaagtctttacaacaaaacttcttaggaacttaggagtcttgaaaaaactacacaaagaacattttaaaacaagcctgtctgaatacatggtaagaacatttctagaattcttcctaggattctgaaatttggattaagttatagaacagtggctggcttacaagcaattgtgagaatttatttttaataatcaaatccaaacagatgacacagacatgactcacttttaagagatgtcacaatttcttatttgggtcagaggagagaaggtaagaatttaaaaaggacacaacttagagaaaagatcacaatataagacaggaagcttctaacccacaggcctaactacttatttgctaggggtgagacacaaagactctacctccctaggcctcagttcctttgagcaaagaacacttcttttggcccaggaaagcattagaagaaatgagataaaacatgaagcattccggctccctgaacgaaataagcccagaaagcaatcacagaattgtgattatttccaaaatgctatgtttaaagcaaggttataatggtataaaattggaaacaatctaaatgtccaagaatgaggggtgggttaaaattacggctttttttttttttttttttgagatggagtcttgctctgttcacccaggctggaggagtgcagtggcacaatctcagctcactgcaacctccgcctcctgggttcaagtgattctcctgcctcagcctcccaagtagctgggattacaggcatgcgccaccacgcccggctaatttttgtatttggtagagacggagtttcaccatgttggccaggctggtctagaactcctgacctcaagtgacctgcatgcctcagcctcccaaagtgctgggattggaggtgtgagccactgcacccagccaattacggcatatttttacaacactaaataaggatattcgtgaatataacacactctaaaaaattacaaaagaacatgcaaagaatatcaacatttttgtaaaaagatatgtatagatttatgtgaacagatacatacagctctattttttaggaaaaaaggtgtgtagatatgtgtgcatatatgtgtgtgtatgtaaaccatacacacacttacacacacaaatacacacacacacggaaaggtctgcaaggatccacatcaaggcaatcatagtaacaatccctgggtagtaggatttgagtatttttgtttatatttttctaattttccaatatgaaaatgtgaataaaattatttttaatgggccagtgcagtgactcatgcctgtaatcccagcactgtggaaggccgaggcgggcggatcatgaggtcagtagttcgagaccagtctgtccaacatagtgaaaccccgtctctactaaaaatacagaaaattaggtgggtatggtggtgtgcgcctgtaatcgcagctactcgggagactaaggcaggagaattgcgtgaaccccggaggtggaggttgcagtgagctgagactgcaccactgcactccagcccaggcgacaatgcgaggctctgtctcaaaaaaaaaatatatagaaaaaacatatatattacacatataagcatacacaatatataaatatgtataaacatatataaaaacatattttatatatatgtttatatatatatatatatttataatcccaacgttttgggaggccaaggtaggagcataaaggccaggagtttgagatcaacctgggcaacacagtgaggccccatttctacaaaaaagtgtaaagaaattagccaggcatcgcggtgcatgtctacattccagctactgagactgaggcaggaagactgcttgaacccaggagtctgaggttacagtgagctatgactgtaccactgcactccagcctgggtgacaaaaagagatcctgtctaaatatatatatatatatatatatatatatatatatatatatatatatatatatatatatatgttttgttttgtttttaatgaaaaaaatgatttcactgttcttctataatttccttcttttttttggtttgagatggagtcttgctctgtcacccaggctggagtgcagtggtgtgatctcagctcactgcagccatagcttcctgggttcaagtgattcttctgccttagccccccaagtggctgggattacaggtacccacccccacgcctggataatttttgtatttttagtagagacagggtttcaccatgttggccaggctgttttcgaactcctgatctcaagtgattcacctgccttggcctcccaaagtgctgggattacaggcgtgagccagcatgccccgacgcttttctataatttctacaacacttaatgaatgaaataatgaacacttttgtgtacgtcctaagaagcaaaccgaatctcaaaaactaacagcctcttcacttcaaagtaaaaaatactactcccttgcttttccctatcccctcagttctgttggacttacagagctgactgacgttggcattttccagcagcgtcacatagccagtgacattgctggggatgtgcacatctcggacttcctgaagatcgctggcattcctccctacagctactgtcacctgctgtggcatgtagctctggtcagtggcagccactgcaatggacaggtgcctaagcacaacatctggcttcatttttaaactggaaaacacaaaaagcagaaattacaaatgtttataggagtcaagaactgacaggatccagaagtcccacctcaaagagcttacatttgatatatccaaagactggttttcctaacagcaactaacttgaaatgctggctatgagtttcaaagtccttctgaccttgaccttcccacattttttaaagacctttcagttcaagattaatcttacgattccttttaagctatttgtacagaaagaacgaacagtatgaacattctaacaaaatccctttacctggcaaaaaagctaattttaaactgcatacaaaaaaactgagtatactctctcatctataaattagatgtctaaaggtcaaatgtgtcctctaagagaaaacaatataattatttctggcacttaattctaccaattggaattagcctgttttctgaggggagaggtgaaaatttcaatagcagcttcagagcttccagaaataccactgtttattatcattagctccactccaggattcttgaccacactatttcttcttctaaagtgaccaactcagttacatacagtgaatttcaaaaatgtatatagaaagaggccaggcacggtggctcacgcctgtaatcccagcactttgagaagttgggagcttgagaccagcctgccaacatggtgaaaccctgtctctactaaaaatacaaaaattagctgagtgtggtggtgggcagctttaatcccagccacccaggaggctgaggcaggagaatcgcttgagccttggagatggaggttgcagtgaacagagatcatgccactgcactccagcctgggcgtcagagcaaggctccatctcaaaaaaaaaaaaagaagtatagaaagggaccgggtgcagtggctcacacctataaacccaacactttgggaggccaagataggaggattaaggctaggagtttgagacaagcctgggcaacgtagtgaggccccatttctacaaaaaagtataaagaaattagccaggtatggtggtgcctgcctaaatcccagcgactgagactgaggcaggaggactgcttgaacccaggagtctgaggttacagtgagctatggctgcaccactgcactccagcctgggagacaaaaataagatcctgtcttaaaaagaaaaaaaaaagtagagaaaggatatttcaaaatacagtcacatgtaagtacttattctttgtggtattaattttcctgagaaactagtgaaaaaagatatgaaatcagtactaatctaaaattaatcaaatgttatttcctcctttaaaatatcagggaaattatctgttaggaatatataagccaggttacatgattttacatgattcattttacttgattcttaaagcatcttcatagccacttaaaatacaaagagtaggcagttaagaagaaaacaatccaaaattttaaaaaacaaaaaagtattatataccacccaccgaatccagtgtgaacaggcactgccatctgactgccagtaggatgaggtttctccatttgtcatcttgtcaatgtctgccgagttggaggatgtttctatataagcatagcactttgctactgacttgagtttatccatctctggacttctagttagatctccagggctttctgtaggggaaaccagagttgattatatgacatccctttcacaaagggaaaaaaaagagtcatttaaaatatctaacagaaatacgcttggtactctggccctagaaacacaaatcttccttaaaatctccttccagatccttttgtagttcatcagtgtcatgagtgggttttcacgcacatgtgtcaaatatgcctccctcaaactgttacgtcattggcatattacctgacgtgaagatcatatgtcaccttccaaagaacccagtggccaaggattaccccatcgtctctatcagtgcaattctttaatcactgatatatttgcaaaaccatgccgagaagaaaatggtaaattacggtttgaatttacattttttaaataatgagtgacactttttaagctgctggcttctgagtacagtctggtcctgccctcttccatgttcttctgagttaattcatacattttctatacatgatcaaatgtatatataaacatacatagaatagctaacatttacttgagtgtttactataacccacgtgcttttttttgttgagatttttttgagagggtctcactctgttcccaggctggagtgcagtggtgtgatcacagctcaccgcagcctcgatctcctaggctcaagtgatcctcctgcctcattctcccaagtagccgggactacaggtgtgcaccaccacgcctggctaatttttttaaaaattttttggagagatggggtcatccctgtgttgcccaggctggtgtcaaactcctggcttcaagcgatcttcccactttggcctcccaaagtactgggattataggcatcaaccaccgtgcctggccatgtgctttttatactttccttatgtattaattcattttaaaaattaagaaactggccagactcagtggctcacacctgtaatcccagcactttaggaggccaaggcaggcggatcacttgaggtcaggaggtcgagaccagcctggccaacatggtgaaaccccatctctactaaaaatacaaaaaccagccaggcacggtggcacgtgcctgtaatcccagttactcaggaggctaaagcacaagaattgcttaaacctgggaggtgaaggtttcggtgagccgggatcacaccactgcacaccagcctgggagacagagtaagactccgtcgcaaataaataaataaaataaaataaataaactaaggaacacagagttaaataattgcccaagggcagagttactaaaaaatttagtcaattgtatctgtaatatgttataaaatttatttttgtacccacaatgtcacttgtttttgactctgcttatatttttttttgctgtgagcaaggttaattttcatacagactaatttattaatcttttctttcatagattctgggtttcatgccttgcttagaaaggctgttccgtattttacaaggtggaactattttcttccaatatttttagcattttatttttagttgaactttttgatcatctgaaatttattttagtgaatggaatgtattaagaatctagtttcagctgggtggtggctcacacctgtaatcccagcaatttgggaagccaaggtgggtggatcatctgaggtcaggagtttaagaccagtctgaccaacacggtgaaacctgtctctactaaaaatacagaaattagccgggcgtggtggcacatgcctgtaatcccagctactcaggaggctgaggtaggagaatcgctcgaacccaggaggtggaggctgcagagatcacgccattgcacttcagcctgggcaacaagaacgaaactcagtctccaaaaaaacatctaagttttattttttcttcaaatggctaactaggtgccctaactccatctgttggaagttcacctttccatcctgatttataacactgactttatctggtactatgttctcacatgtatatcggcgtctatgcctgggctctgttatgttccacagacctatttatacacatcatgaacttctgttgccatctccaagtgagtctgtggtggcttccttcatttatccagcaaatactcattgaatacctaccatgcaacaggcacagtgcaggaatgaggaagcagacaagacagacaacacacaagtgaatcaataatgctacaacttcagataacaataagcgcgatttccaccattaaacctgcaaaggtgaccctgaccagaaggtggggtaggggaggtgttaattagataaagcggaaaggcatccctcaaagtcacatctgagcagagaattgaatgatgagaaaccagctgtgttaagaagaaagggaatgaggagaaagatcacattcttacgttacaaactcatgactctgtattttcagaaatgaaggcagggaaaagaattggctcattttaccaacacaacagttagaagaaatgatcagagtattttcaggagaacccccacacacacatacccttttccttttgtaccagctgatccagagactccttcaggacggaagaccgcatggtgcacatgttattgcagtgctccagcatcgggtagggcatcaccgcgctggagagccgattgcggtgcaggaagcgcagtatcattgacgagtgaatatcaaggccctccttcgactctgaaaatatgtctgtgaaacctaaacagatgaaatccatttttggtgttttggggaagccacagtagtttccacatcccctgcctggtggcctatctgaattggctaaattaaaagcagtcattaacaatcttcattgatattttcagttttaattgttaaaaaatctaagttttaaagaaatgaaccagtagcattctgaacttaagaattaatttagctgggtgcagtggctcacgcctgtaatcccagcactttgggaggccgaggcggacggatgacctgaggtcaagagttcgatatcagcctggccaacatggtgaaaccccatctctactaaaaatacaaaaaagttagctgggggtggtggcaggcgcctgtaatcccagctacttgggaggctgagacaggagaatcgcttgaactcagggggcggaggttgcagtgagcccagatcacgccactgcactccagcctgggcaacaacagtgaaactccacctcaaaaaaaaaaaaaaaaaaaagaattaatttaattttagttgaaaaatattttagaagacttagaataacgattttttgtttcaatccaatcttcaaaaatgtataagcacttaaacactaatagacgtttttaaggaagtcttgcgtatagaatacagggtagaaataaagttcagtgcattaagagtaaaatcataactgcttttatactaagatactaagacaatgataatgacaatacaaccactgccattaccacagtttccaacggcattttacaaccaataaggtgcttccacatacatcatatcattccatcctcacagtaaggtgaggggaggcacagaaggtacagctatcctttttaacaactgaggaaaatgaggctcaggtgacacaccaagatgtcaactggtaatagggaaccccccatgaggccatcggtacaggctgggagagagaaggcagggtgacgggtgggaaccatgggcatttgagtcacttcctcatgtaatttacttgtgccttcaggacctgctcaagcccaatcacatatataccactttcattcgatgatggaatgctgctgtgcacacccaactttaggctggatgggtcagaaagcacccagttcatgacaggcagttcaggtcacacggtaaattgctgacccatagtccaatgttcagtttctaccaaggcccggagctgtctctcaaaagaagagtagttatctgcaaaagatagtagggccttgctccaaaatcttaaaggcctctgctgtgattcacctatgggggtctgccaaaggctccaaacagcatccctgtctgccactgacacctcaagcaccatcagatctgctgagtcatatgacccaagcggcagagcagcttgcacagcagcctggacctgtttcagagctaccttctgtcctggacccctctcaaaactggcagcctttcgggtcactggataaatgggccagagcaacacacccaaatgaggaatgcactgcctccaaaatccaagttggtccactaggtgatgtacctctttcttggttgtaggaggggcgaaatacagcaacttatcctttatcttagaaagaatatcttcacagccccacatcactgaacccctaaaaatttcactgaggtagaaggtacctgaatttatttcagacttatttcccaccccctggcacacaaacgtctcaccaataagtccagtgtgtttgctacttctcactcactgagtccaatctgcacaatgtcatcagtgtcatgtaccagtgtgatatcttgtggaagggaaagtgatcaagatctctgcaaacaatattatgacgtgaagctgaagagttgatgtacctgaggtaagacagtgagggtatattgctggccttgtcagctgaaggcaaattgcttctggtgggccttatggacaggaatggagaaaagggcatttgccaaatcaatggctgcataccaagtatcaggagatgtgttaatttgctcaagcaatgaaaccacatctggtacagcagctacaatcggagtcaccacttggttaagcttacgataatccactgacatcctccaatattcatccgtcttctgcaccggccaaatatgagagttgaatgggaacatggtgggaatcaccacctttgcatctttcaagttcttgatggtggcaccaatgtctgcaatccctccaggagtgcgatattgtttctgatttactatttttctaggtagagccagctctgatggcttccatttggcctttcccaccggaacagctctcaccctactggtcaggaagccaacatggggattctgccagatgctaagtatgtctattccagttatccactgcgtcccgttctttcccaatcaatgccctcattttaaaagtagacacctgctgagactgagcatgcacctttcattggaggtcagccactcacatgacatgagcttgtgtctgattttccacaatttcagccctttgtctaaaggaggtaagactctcacccagggcaatcttggaagatgtgaggctaagtaagcatttctggagacagaatccctgagctcatcctcttctttcatcactttgtccagcaaacttaggagcaccaaccaacttcattatagtccttggttctccatatatggccaaaggtatcatgtatagagtcactaaactccttgattctcaagagaggtgaatcgggaatatcaagtgcatttattctgcacaactctcttaacagttcacaccaaggactaacagcattctccatactattagaggtagactccttagcatttttgggtctaatcaaattaaacagccaactcccaaaactacaaaaccaactaaaggaatccatccttaaaattctgttcctcaaagaccaggcgcagtagctcatgcctgtaatcccagcacttttgggaggccaaggcgggcagatcacgaggtcaggagttccaagagcagcctggccaacatgatgaaaccccatctccactaaaaatacaaaaattatctgggcgcggtggcgggtgcctgtaattccagctactcgggaggctgaggcaggagaattgcttgaatccgggaggcagaagttgcagcgagccgagactgcgccactgcactccaccatgggtgacagagcaagattccgtctcagaaaaaaaaaaaaaatgttcctttagaaccccttctggtatcaaaatctgtatgagtcagtgttctccagagggacagaaataataggatatatgtatatataaaagggagtttattaaggagaattggctcacacaatcacaaggcaaagtcccatgacaggccgtctgaaagctggggaagaaagaagccaggagtggctcagtctttttcttagctgactccacagtaatacctgagcttcatatttaggatactgctgatgctgcactgttttgctcaaaacctatgtgagaaaacagatttggcacagtggctcatgcctgtaatccccacatttcaggaggccaaggtaggtggaatgcccgagctcaggagttcaagaccagactgggcaacatggcaaaacgttgtatctatgttaaaaacaaaacaaaaacttgttcctatgatggaaaaagtgttttcatatgctgaaacatttggtaaattaatttagccttcagtaaatgaattccaagcctaatgaatttggaaaaggtactgttctcttttcttaaacgcttaagcaccaacaccatgagatacaaaaggaactagttttagtgcagacgaaggttagaaactaaaaattcccaccaccaaagcaacttcagcttacaaaggttcattccaagactgatgaattgggtgctgatgaaaagttttgagtaggaagtcctaagtcatgagcctgctatgtaagtgccttgagatttggaccctgatgctttctcaatctcatcccccatttcagcagttgcccagcacaacagtacactacgaattatctgttggtggattccctggtctcaatccctctgctttcctccccaaaactgtctgaggtgtccaaataaagctcctgatgctatccacatgctggtaatgcaaaagtggagtagtatgtaaacgctaagataaaagctagctaaagataattcaggccgggtgcagtggctcacgcctgtaatcccaacactttgggaggccaagacaggtggatcacttgaggtcaggagttcaagaccagcctctggccaatatggtgaaaccccatctctactaaaaacataaaaattagccggacgtggtggcagttgcctgtgctcccagctactcgggaggctgaggcacaacaatcacttgaacccaggaggtggaggctgcagtgaatggagatcccactgcactccagcctgggtgacagagcaagactctgtctcaaaagaaaaataataataattttaattgccatgagactagggaaaaagttaacatgtataacattacataattaaagacaacctgaaggagaatggagatacacattttttttttttttgagacagggtctcgctctatcacagggatggagtacagtggcgtgatcacggctcactgcagcctcaacctcctggtctcaagcaatcctcctgcctcagtatcccgagtagctgggaccaatggtgcacacaaccatgacctgctaatttttttcgtaagagatggggtctcactatgctgccctggctggtctcaactcgtggcctcaagcaatccttccacttcggcttcccaaagtgctgagattacaggcatgagccaccatgtctggctggaaatatacattcttcattaatgtatggaaactatccttccctagctcaatacgtcactcagcagtgagtaagctagagggtcaagagcaatcagatttacatttatgtgtctatcaaatctattttgcctccattgctgccctagtgaccctaagtattatgacaccaagtgcacagagcaggaaaaacgctgaggtaaagtaaaccaagaccgaaaggaaaatgtacaaagtttctttctctttcaaacacaattgtcttctcactagaaaaaacaaatgttaattttattatgattctgtctttacgtgtaagtctgagctcccccccaaaaaaatacaaaaacacaggccatgtcttttctttttttttttttccagacggagtttcgctcttgttgcccaggctggagtgcaatggtgcgatctcagctcactgcaaccaccacctcccagggttcaagtgattctcctgccttagcctcccgaatagctgggattacaggcatgcaccaacatgcccagctaatttttgtatttttagtagagacggagtttctccatgttggtcaggctggttttgaactcccgacctcaggtcgggaactccgcctacctcggcctccccaagtgctgggattacaggcgtgagccactgtgccccgccggcattgcttaattttaagctatttttattcttacttaaatttctgaatatagtagtcctcccttatccacaatttcagttacctgtggtcaataaagacgccaaaataggtgagtatggtacagatactgtgagacagaaagagaaagaaagaggagccacattcacctaatttttattttactatattgttataatcattctattttattgtcagctattgttattgacctcttccttttttttttttttggagatggagtctcgctttgttgccctggctggagagcagtggtgcgatctcggctcactgcaagctccgcctcccaggttaacgccattctcctgcctcagcctcccgagtagctgggactacgggcacccgccaccatgcccggataatttttttgtattttcagtagagacggggtttcactgtgttagccagaatgatctcgatctcctgacctcgtgatccgcccgcctcggcctcccaaagtgctgggattacaggcgtaagccaccgcgcccggcctgacctcttcttattatgcctaatttatacattagaatttatcataaccatatatatatatatatatatatatatatatatatatatatatcagaaaaatatatagtatatatagggttgggtactatccttggtttcaggcacccactgggggtgctggaacatctcccgcatgggtaaggagggaatactgtaatagctttcttaaaaaaccactaagtgcttaccacatgccaaaaaaaatgacgcaaatgtgaggacagagcagaaataagacagaaggtccctgccctcgtggaactatagtacatgagtgaagacaaacactttactaataattgaataatgaattgatcaattacaatggtaatatgttgcaaaaaagaatgcaggatgctaagagaatgaacagtgaaggccaaggagggcttctgtagtgaaatgaagagatccaataaggaaagcggccacgtgacaagggttcatgttataaaacggtagaactgcttagccaccaccgtactggggatgaaagagatgactaaaggaaatgctaattcagatcgggagcctaatgaacactgttgggggagtttactgcatgtggccacaattttgcctaatttcaatcagtagtatagcaaagttcactttggttctaagacagcacctagatggaagcctcacctggaaccagagagcaggcctgtagttgtctgatgatgtggctcagctccccctgaagattagctccactggaattcttgagggcctccaacatgttctcggcatcaactgtcccatcaccctcagcatcaaactgggcaaaggcctacaagataagagatgcaagaaaatcagggctgtttcaagtaaacgagggcagtttcaagtttcttttatttaaaattctcgagaccggtgatttatttatttttggttgcagagagaagagtccatatgtatcaaccaaagataaatttagaacaggaactcactgcgctttgtaggatgtatgtatgcaagtacacatcttatttgtattccaatctatattccaagagagtaaccattaagtaatccaagagagtaattatgtagtaagtctcctccccactaaataatttcagaaggaagcagccactgtaaagtttttcaactggttgcaaagtgccagaatataaagaattggcttagaatagcacctcgactttagctgggctttttcttttccctttttgagacacagtttctttcttgtcgcccaggccggagtgcagtggtgcgacctcaggtcagtgcaacctccgcctcccgggttcaagtgattctcctgcctcagcctcctgagtagctgggactacaggcgcctgccacaacgccaagctgattttttttttttttttttttgtattttcagtagagatggggtttctccatgttggccaggctggtctcaaactcctgacctcaggtgatccgcccacctcagcctcccaaagtgctgggattacaggtgtgggccaccgcgtctgcctgggctttttcaacactctttggacacaagagctaacttggtttatctgtttcacagccctgttttcactaacctttaattgtaatctagcttgtctcttgcccatgttgggccatctggggaacctgggacagtagagatttggtttaaatctgctctatcactactctgctatgtgaccttacctaagtttctttacctccataagccacagcttcttgatctgaaagatgcagcgaatattgtcaacctcacaggctgctgcctggattaagtaacatttgaacagagcccagtacagtgaaaagcacatcggccctgtagtgttccccttctcctttctaacctcaccctctggtgtccctgacccccttcccttacatcctacaagacttacctcacttagcaactgccctctctccccagatttcaaacccttcctcaacaatgccttctgccctcctgctgatacactcactcacacatcgctctcaccatgcaatacttcaggagtctttaagcctcctttccaagtaaccctctctctttcttaaaactcctgccccttgttcttatttctctcctccatgaaataggaaaacaacctactgaggtttcatgactaacataaatacccctatttccatcatagacctctgaacaatgcagtgtttaagaggaacaaatgcaaattcctgtatttgagtccaaaaaccatgggcataaatgcagtaatggggacagtcagcttagaagcagcatggaaaagatcacagcattctttttgcctctgttcaacctggcaagattatccaaaaagttaataggatcaaagacttcactaatcaaggtataacattcaaaaggagagcaggtattatctttttctactctgactagacccaatcaagaaaggtgagtttggttttgaagctacacaccaaaaagaaatgaatggaagagatcagaggacagaaaccatgacagaaagaagactagaaactgtgccctgttgggggaatcttaagtgcagagaaaagaggcctgggagtcacacagtcctgatgagctataatgggaaggagggaagcagcagttaaaattaatgtcattggatagaagacagagggaaatgctcatgataaaagtggacctgtctgttgtcatgggcataaagatgggttaggaggccgggcgcggtggttcacacctgtaatcccagcactttgggaggccgaggtgggtgaatcatgaggtcaggagttcaagaccagcctggcaaagatggtgaaaccccgtctctactaaaaatacaaaaaattagccaggcatggtggcaggcacctgtaatcccagctacttgggaggctgaggcagagaattgcttgaacccaggaggcagaggctgcagtgcgctgagatcacacactgcactccagcctgggtgacagagagcaagactccgtctcaaaaaaaaaaaaaaaaaaaagagttaggaggctctgggaaaaaatgcctacaccctatccctcaaggcttcagagcagcgtctggacaaccagtcatcgggagtactcatagttcaaaaaagtcatactaaacaaacgcatttacctctgttccctcccaaaacccactaagacaatattatcaagagatctggggtgtgtgtgttttaagcacacagacaaagaatacaagatgcaacagctacaaaattttggaagcttggaaacagatggataagtagtacctggttggttgatccaagaaggtggaattctaatctgggtaggcaaggctgagaaggaagctgtcccatgctgcaggcccaaaaagacttaggggctggtaataacaggtgctgtggaaagtggatgtaagtggtaaaaagcctattttaaaaagcagaactgggccaggtgtgctggctcatgtctataattccagcaccttgggaggccaaagtgcctcccaaaagggtggatcacttcaggccaggagttcaagaccagcctggccaagccagcaaaactccgtatctactaaaactacaaaacattagctgggcatcatggcacacacctgtaattccagctactccagaggctgaggcacgagaatcacttgaacccaggaggtggaggttgcagtgagccaaaattataacactgcactccagcctgggtgctagagcgagagtctgtctcaacaacaaacacaaaacaaaacaaaaagcagaactgactggattttttttttttttttgagaaaacaatcttgctctgtcaccaaggttggagtgcagtagtgcgatcagctcactgtaacctcaaactcctgggctcaagagatgctcctgcctcagcctcccaagtagctgggactacaggcgtttcacacctggctgatcctttaatttttctgtagagagggggtctcacactttgctgcctaggctggtctcaaacttctgccttcaagagattttcccacctcggcctcccaaagagttgagattataggcaagttacgatgcccagctctaaatgatcttaaggagaaactggactttgtgttttgctttgaggagaaaagggcgacagcagtgttgcatgtgttttttaaagtgttattttgtagagatacataatgaaatatttatggatgaaatgatatgatgtcaagattcacttcaaaataatatggataggggaaggaaaaagcagggggcggtttagaacaaattaaattggccttaagctggtaattgttgaaactagctaattctactcttatttctactttcttatgtttaaaactttcctattaaaaaaaaagccagatcccccttcccaatcttggcagaaatctgggggtgtattctctcgagagcagtatggcgtgtggactagaaaataccaggcacaactgaaagtgagaataccacactgagaatagggacactgatgtttacttgctcaatgtgtaagactcaatcttcccccaggtttcccagaatgctggcagctagccccatagcctcatacccttcaggcaaatgactggaaaagtattctctggggaacctggtaaactcagggaacgcacctatagccgccaacactggggatctcccaacgaaagggccagccagttcatctcgctgtgagtccaccagttgacaagccagacacaaagagcaaccagctttttagtcccccattccttaatgagtggacagcccaggccaccgggacatttgagtaaagccttaacataaaactcagaaaaagcaactaggagaggccagatgcggtggctcacgtctgcaatcccagcacttcgggaggctgaggccagcagatcacttgaggccaggaatttgagaccagcctgcccaacatggtgaaaccccgtctctactaaaaatacaaaaaaattagctgggtgtggtggcgcgtgcatgtaatcccagctactcaggaggctgcagcacaagaatcgcttgaagccaggaggcagaggttgcagtgagctgagatggcgccaccgcactccagcctgggtgacagagccagactgtcttaaaaaaaaaaaaaaaaaaaaaaaagacaactaggagaaaagacagacaatgcagggaaaatagaacttcaaaaggatgattaatatcttcagagaaatatttttctaaagttgtttttttttttttaaatttgacacagagtttagttctgtcaccccagctggagtgcagttgcgtgatctaggctcactgcaacctctgcctcccaggttcaagtgattctcctgcctcagcctcccgagtagctgggaccacaggcatgcaccaccacacctggctaattttttgcactttttggttgagatggagtttcaccatgttggccaggctggtcctgaactgctggcttcaagtgatctgcctgcctcggcctcccaaagtgctgggattaaaggcgtgagctactgcgcctggccaaaatcatttttttttttttttttttttgagacggagtcttgctctgtcgcccagactggagtgcagtggtgggatctcggcttactgcaacctccgcctcccgagttcaagctattcttcctcagcctcccgagtagctgggattacaagcatgcgccaccacgcccagctaatttttgcgtttttagtagagatggggtttcaccatgttggccaggatggtcttgatctcttgaccttgtgatctgcccacctcggcctcccaaagtgctgggattacaggtgtgagccaccgcacccggcccaaaaaacatttttaataccaactttactaaggtatgtaattcacacactataaagttcctccttttaaagtgtataattcagtaggtcttagaatactcagagttgtgcaaccaccattctcttataataaacagatattgcaatcatgaaagaacaggataactattaactaaaaacaggatattgagaaaatgtttaaaagctcttgaagggagtataaattagttcgatcactgtggaaagcaatgtggcgattcctcaaaaagctaaaaacagaactaccatttgacccagcaatcccattactgggtatatacccagaggaagaaatatcattccaccataaagacacatacacacaaatgttcactgcagcactattcaccatagcaaagacacgcaatcaacctaaatgcccatcaatgacagactggatgaagaaaatgtgtagtccttcaacataaataaggtaaaaagaaaaaaaagagggctgggcacggtggctgacacctgtaatcccagcactttgggaggccgaggcggatggatcacaaggtcaggagttccagaccagcctgtccaatatggtgaaaccccatctctactaaaaatacaaaaatgagccaggtgtggtggtaggcacctatagtcccagctactcgggaggctgaggcaggagaatcacttgaacccaggaggtggagaaaaagaaaagaataaaaaagaaaatatggtacatatacaccatggaatactatgcagccataaaaagaacaagatcatgtcttttgtgggaacatggatggagctggaggccactatccttagcaaactaaggcaggaacagaaaaccaaatactgcatgttctcacttacaagtgggagctaaatgatgagaactcgagaacacaaagaagaaacaacggaccctggggcctacctaaggtgggagggtgagaggagggagaggaccagaaaaaataactattgggtgctgggcttagttgtaatgtgtacaaccaacccccatgagatgagtttacctctataacaaaactgcacatgtaccccagaacctaaaaagttaaaaaataaaaatatgaggttgggcacggtggctcatgcctataatcccagcactttgggaagctgaggcaggcagatcacctgaggtcaggagtttgaaactagcctggccaacatgcgaaaccacatctctactaaaaatacaaaaattagccgggcgtggtggtgggtacctgtagtcccagctactagggaggctgaggcaggagaatcgcttgaacccaggaggtggagcttgcagtgagctgagatctcacccttgcactccagcttgggtgacagagtaagactctgtctcaaaagtaaaaataaataaataaaaataaaaagctcttgaaaatgaaaatatcacaacaaaacaaaaatctcaaaggaaaggttggaaggtgaagagaccgaagtgcccatgaagtagagccaacagacaaaactaaggaaaccgggagagaaaagccaggaaagtcagcgggccagttcaaggaaaccgggagagaaaagtgaagggaaatccggggaccagttcaagacgtcccacatccaaacaagagtttaagaaagatggaatgcagaaaacgtaggggaggaaatcactatcattacgattcaagatcatttccccaaactgaaggacatgagttccgtgactgcaggggctgattaccctgcacacaggataaaagtgcatcacagtgaaattttttaagactgaggaaaaagggaagtcctacttccagggagaagaaacagtttctatgtcaaaggtcaagaatccgaatgggactcgatcagcagtcacatggaagccagaaggcaatgaaagtagtgactgccacattctggggcgtgccttttctaacccggaagtcattactcagcccaaatcccatcaactgtgagagagcagaagaaaatcattcttacacatgcaaggttctcaaaagatgaactactcaatcctccctttttcagaaagctactagaggatgcagccaccagaacgaagaaatatgccaagacaggagaagaatgggatccaagcaggagaaaatgaatccccaggatgacggagcttctcagatgacacccgcacagccgacctagagaataacaaatctagattaaagcagatcagaaggattcaggaaatacttccttgagaagatgaagttgatagaatgccaatgtgtttaaacatattgaacgtttctgttagaggagatttagacaactggcagagaatctgggactaaattaatgataaaagactgaaaattaggaaaattaaagtatgtattcaattgttaactccaaagaaaataaaaagatgtataagaaaaaaaaaggccagacgcagtggctcatgcctgtaatcccagcactttgggaggctaaggtgggtggattgcatgagtccaggagttcaagaccagtgtgagcgatgtggcaaaacctcctctctacaaaaatatacaaaaatttgccaggcgtggtggtatgcacctgtaatcccagctagtcgagaggctgaggtgggaggatcacttgagcctagggggtcgaggtgcagtgagccaagattgcaccactgtactccagcctgggtgacagagcaagaccctgtctcaaaaaaaaagaaaaacaaaaacatggtactatatggcacagcaatgtaaagaacttacataatcataataaggtaaaggtcaaagggtgatctaaacaaaatggacagaattgtagcgggaggacaggggacgtgcatgcatgggcaacgatgggaaggtaaaagacaactcaagtctcatcactgatggtggaaataaaatagataaagcctaaaactgaaaacaatcacaaagaacataaacatattacttggtaatacagcgttaaacactcaagaaccagctagagttgaaaagtaattgttcttggggaatgagacattgggacaggacagcaggaaagcattgtttcttgttcaagtcctgtcggctatataccgtgtgcatgtacaactgataaaaataaaagcctaaattttctctttttttttttttttttgagacaccaggctggagtgcagtggtgcaatcatggttcacttcaacctcggcctccagagttcaagtgattcccatgcctcagcctccgaagtagctgggattaaaggcatgcgccaccatacgtggctaatttttgtatttttcctagagctggggtttcaccatgttggccaggctagtctcaaactcctggcctcaagtgatccacctgcctccgcctgtaatcccagcactttgggaggtcaaggtgggcggttcacgaggtcagggcatcaagaccatcctggctaacacggtgaaaccccgtctctactaaaaatacaaaaaattagccgggcttggtggcaggcgcctgtaatcccagcactttgggaggccaaagtgggtggatcacaaagtcgggagatcgagaccatcctggctaacacggtgaaaccccatctctactaaaaatacaaaaaattagccgggtgtggtggcgggcgcctgtaatcccagcactttgggaggccgaggcgggtggatcacgaagtcaggagatcaagaccatcctggctaacacgatgaaaccccgtctctactaaaaatacaaaaaattagccgggtgtggtggcgggcgcctgtagtcccagctactcgggagactgaggcaggagaatggcatgaacctgggaggtggagcttgcagtgagctgagatcacgccactgcagtccagcctgggcgacagagcgagactccatctcaaaaaaaaaagtggagcaggtgggggaagaaggaggtggcacagagcagagcctcatcttccctgaggccctgcggtgggaacgctacactaccagataatagctacttcccaaattgttcacattatagcatactgagaaaataatgatatttgtaagactcaaggtctgaggagattagcacagctatcattcattcagttgggaacgacacacagacttggaaactatgaatcaatatttgggcactcgttaaatgccaggcaccgagcagagcattttatatactataatgtcatttattcctcataacagtaacagtactattaacctccccgtcttatagttgtacagagaggtcaggtaccttgcctgaggtcacacagctagtgtttgcatccaaggcttcagggttcatgttcttcaccacaactcccttccccttcctttgaccagataacccctcgggttccttaccatctgaagaccaaatgcttaaaacctcttagctccattactttcctccatctataaaagctgctttccgctccttttgtccaggtgaactcctatcaactctagaagtgagactcactccctctgaatctcaaggtagcactcaagtcccacttccaccaaaacttccacaaatcaagcactccctgcacctccaacttcccacacaactcctgctgtgtattgctaataaaaattctatataaccaaggctataaaaatactgacatttttgctatcttttttttttttctttttgagacagggtcttcatctaccacccaggctagagtgcagtagcgtgatcacagctcactgcagccttgacctcctaggttcaagcggtcctcccacctcagcctcctgagtggctgggacatgctcagctagttttttatttttttgtagaaacaaagtctcactatgttacccagactggtctcaaactcctggggtcaagcaatcctcctgccttggcctcccagactgctggatttatcggcataagccactgtgccaggccatttttgctatttttaatagattctattgattcatcaatagttaatgaatatgataaaagggattttcgaataaaacaaaaacaaataattttggctaagaaaaaaattaccacagctttgtgaacagcttcaccaaataattatgtaatttcctaacactcaaaaactgactgtcttaagaaaagaaatgttcaggtttgctacccaggaggctgaggtgggaggaccgcttgaacctaggaggtcaaggctgcagtgagctgtgatcacactactgcactctagcctgggtggtagatgaagaccctgtctcaaaaagaaaaaatatatatatatttatatatatttatatatatatatttatataatatataattattatataaatacctgatcctgtgtttggctctgtggatacaaagatgaatagggcacacagtcctttcccttcaaaaacctcacagcctagaagacagatctgtaaaccaacagcagcaatgtaataggtgtgacaattacgatacgagaactaagagtataaactatttacaacagccaatgttagtgagcaccaggcagagttctaagcccttcacatggatcaacttatattttccacaacaactctaaaggtaggtactacctttttgctggtgacgaacagagaggttattttttttaaggcatatggttagtacacgatggagcttgaatttgaatcctggactgattccagatgccacaattaaccactataccatgggccaacagacactccagggatgagaagtccgagacagggaggggcgttaggggaaatggcccagaaaaaaacaacccttaaactgtgctttaatgggtaactaggagtttgaaagtatatggcgagggagaggcaatctcaggtagaggagacagactgtcagcatacataaagactgtatggcagatagtgagaactatgacctgcctggtgtggctggaaaggaacagggcaggtgatgaagacagggctagaggtcagaataaaaagagcctggcagacccaggatgaagagctcagatattacagtaagggcaccatggggccactggagactattaagggtggagggcgctgatcaccccagatctgcataagctctcttatgtgtgggacctacaaatctcttaaaatatgtgcctttgtgccagatgcgttggcttacgcctgtaatcccagcacttcgggagcccaaggcagtaggattgcttgagcccaggagctcaagaccagcctgggtaacatgatgaaaccccatctctactaaaaacaaaaaaattagcctggcgtagtgaggggcacctgtagtcccagctactcaggaggctgaggcaggagaattccttgaacctgggaggcaaaggttgcagtgagctgaaatcaccactgcactgcagcctgggcaacagagcaagactccatcttaaaaaaaaaaaggtgcctctgtacagcctgaatccattctccagtgtctctgagagcgctcagccactttctgttacacacatcagtgatgcttcccagctcatctcctctggacagttctgacagcagtaactctcttcctctagtgaactgaaaacctgcctccccaaagttaccatccctggggccattcagaacacatctactccttctgcccagagacaacctgcagatcactgataacagcgatcaggtcctcggagttcctgccaaacccttctccattctttccaccagctctccatttgctatggtctcagtctcattcccatcctgattgtcacctttgggatccctctagtttgtcaataaacctcagaacaagtgcttctcaacttttattggctgatccagtaaaatacattttgcatcatgacctagcatacacataattggtatcaaagttccaagaaacaatgcaatactttttctcatcagttacaatgtactctgatattttctctttttttttttttttttgagacggtgtctcgctgttgccaggctggagtgcagtggtgcgatctcggctcactgcaacctgtcgcccaggttcaagcgattctcctgcctcagcctcccgagtagctggaactacaggcgcgcttcaccacactcagctaacatggtgaaacccccgtctctactaaaaatacagaaattagccagacatgggggcaggtgcctgtaatcccagctaatcgggaggctgaggcaggagaatcgcttaaaactgggaggtggaggttgcagtgagccggtattgtgccactgcattccagcctgggcgacagagtgagactccgtctcaaaaaaaaaaaaacaaagacattacagaggctagaataaacatcttgaactacaaccatagaaaacagtaacactgccaattacaacacttattgagcactgagcaggtgagctggttttatgggtgaggcgactgagacactgtggtcaagtaggttgaccaaagtcagctggcttgagaatggtggaactagaacttgctcacaagcaggctggctcgaggcccagttcccaagctcagtctgaagaacagcagaatgagcagactcataacacggcaaacccgctgatgccattacaggctaattacacacccgtccaggttgctatgaaaggggtcccttttcgggggcagagagggggcagcttgcaggcaatgagtaccaaggtcccagctggttcagactgtaggctaggtgctaaaggatcattcccaaaacgtgccatgccctctcactccagtatatctgcatatgctgtgcctttcatacggcaaatcccttccttcctttgccaggcgaattcttccagcctctcaagccttgttgtgatgaagcctttctcaaactccatgctgctggtaactgcttctctgtggtccctgaaactggagtgggcttaggatggagcagggagcagacaggaggagaaggagagcaaaggacaaaattcccacatacatgggaaacgggaccataaagtggctgcttaaagagcactgggagacaagggtagaaggtataagagtgtaaaggctgctccaccattcagatgtgattctgaaggcaatggggagccactgaagtttctaaagcaaggcagtaccatggtgaggtggtattttggaaatcagggagagacaaaagagctgtggcccttcctccatagctctcctaggtcatgaatttctccaaagaaaccaataccattaactcccccatagcaaaacacacaaagccaaagtaagcaaaaataatctccactcggccaggtgcgatggctcatgcctgtaatcccagcactttgggaggccgaggtgggcggatcacaaggtcaggagatcgagaccatcctggctaacacggtgaaaccccgtctcttactaaaaaacacaaaaaattagccgggcgtggtggcaggcgcctgtagtcccagctactcaggaggctgaggcaggagaatggtgtgaacctgggaggcggagcttgcagtgagccaagattgtgccactgcactccagcctgggcaacagagactctgtctcaaaataataataataataatctccactcaccaaggatctttcctgtactgcctcatcaccatccacagccagccatcccttaccaaagacctcctgtgtacaatggtagtgcaggcaggtggctggcggcctcacagcctagttgcacagcaaggccagacagtatgctctaagtgccaaaggatctgtacagaacaggtaacaggagcctcagctgtagggctgaaaacaccattatggagacactatctgaatcatgccacagaagatgtggtgctgaccaggtgacagtgccaaggtggggaatcttcaagaactgatagcaaggtccatacacaggacaaaggaggtgtcccactagccagcacagggctcatgcgggggtagggggaagataaattaggtaagggagttaggaacaaagcaggcatcccactagctagcacagggctagtgcaggtgggggaaaggtaaattagctgagagagttaggctgatgtgtgggcttcaaccgattcagacaaatacatatttggtcccttgggtagtggagagctgagggctcccggctgaaggcaagaaaagctggcagcctgctgttgctttatggtgcacacacacagctcttacagtcaatagtcttaaaagggcagataatcacatctgcagattcctacggcacagttcctgggctcaaagccattctaaattagttgattaatacttttcacataataatatgaagacgagcacagggcttttctacaaacttcctgtaaacccgaaagtgactaagaaccttttaaagttttcacaaaaatcatatttaaccgtttccttcaatgtcaagaaatattaaaaggttacagactgaatataaaatatgaggtttgagtgtgtgtggactacaacttctacagtctcccaaagcacctgggcactggcaaccacccaggactgtgctaagacgatgaacagagatgaatcaaaaaggcccttcccttagagcttaccaccccacgaatttcacaaagtaggcaccaaaactatgtggcaaattaataaaacacaacctattcatatgaaatttcactttagggccatctgttatcctgtactcagcacgtttttctgccctagaagattttctagaatcatactctaagagcataaatatctaatctataacctctgatgtgaaataagaacttaattttaattctatttcccctctacatggcagttaattaaatattgctccttgtgagcaaactgagagagtcccttctccctggaccacacctaccatgagaaaaggtgtgttgtactataaaatgataatgtttcagactttggtccatggtccaactccaagaacttctttataacacctcctcaagtaactgaggtcacaggaatgtgaaagcaagacagctgcgtggacaccaatggcagctaagttaggaagccaaagaagaaacatgtaacacttggaaactctcagcattataataaaccatgcgcaccttctccctggaccacacctaccatgagaaaaggtgtgttgtactataaaatgataatgtttcagactttggtccatggtccaactccaagaacttctttataacacctcctcaaataactgaggtcacaggaatgtgaaagcaagacagctgcgtggacaccaatggcagcgtaagttgggaagccaaagaagaaacatgtaacacttggaaactctcagcattataataaaccatgcgcacccgtggctatctgttttaccatgttagctcttataaaaacgaatgacggaaacaacttgtcattttagttgctactataaagacattacttcacaagcccttcatcttgcagtaaaatacagcagtatattctcaaaagcttagacgtagattaacaacgcagaattaactgtgtaagtatgcacaaaagtatatacttattcaagtctaaggatagacattcttaaagcacagaatcaaatgcatggctaaatcttatcttctttggctagtcctaacttactagttcttacagacagagcagccatcacaagattatcatgagagacggtggccactgtgagattatcacaatcaggtttttaaaccttggctaagcctcactcacagaactgtatgacctagctatgtgaatcaaagactgccaaatataactcaatgttttctctccccttcctcaataattaagccctgagttttagctgaatatatggccacggaaaaagaatctttcccagcctgtcctgcaggtaactgcggccatgtgactgaattttggcctgtgggatgtaagctatgcccgtaagagagtgggcatggcttcttccttctccttcccttttccctttcttgcttgttggaatgtggaaaatgacagcaggagtcaacagaattactaagtggaagatgtccgtggaggatgacagcacaagatggacgaagccaggtccctgatgatgacaacactgccacatcaatcttggactgcctacctggacattttcataaggaagcagcttctttttatgtttaaaccactgatgcattaggttttctgtcccttgaaaaagttttgtgtatccctaatacaccacaccagacttcttccagattctctggactttgaacttttgtggatacaatttcctctgcctgaaacgctgttactacctcctgtaacactatctgctttcaccattcacctgtgggctgaaatgttaccttctcaggtaagtcttgcttgagccccaagtgaggttaaatacacttgctatttattccttataccttccccctcggttaacactcaccatatcttataattaatgggttaatacctgtctcttccaccacaactacatactctttaagagcaagtatctgctttgtccactgtcatccaagtgagtggcactcgatatacgcccaataaacatttgctcagtgaacaataatgccacaacccctgagtgatttctggaccacacctcaagtatttcttgaccttctattaagggactcctatgaactctacataaagttctatttctgtcagaaactctcagaatgtaaacggtgtttctctccatttgcctttgctcaaatctgcaaagtgccatctccttcaacagttctgcatggttcttcccactactacttcatattctcataatacgcgtagatactagaaagaaggtactatgtgtattcctggggggaaaaaaaaaggagatctttcactaactaatatgacttttttttttttttttgagacagagtatcgctctgaggcccaggctggaatgcagtggcgtgatctcagctcactgcaacctccgcctcctgggttcaagcggttgtcccacctcagcctcccaagtagctgggattacaggcacccgccaccatgcccagctaatttttgtatttttagtagaggtggggtttcaccacgttggccaggctggtcttgaattcctgacctcagatgatcctcccgcctcagcctcccaaagtgctgggattacaggcgtgagccactgcgcccagccatgactattatttttaagggttgggatgccttaaaggtacttttttcataagaaacacacaaactacattatctgaattctggccatgtacaggaagacattcttaaaatattttaaaagcctctgattttaaggtgaacagaaccttttaaaggcactgcaagtacccgctggtttactgctttatgtacacacccttcgtggccactgaagattctacatgactggctaactcattttcacaaaataagtacctttttggtcataccgtggtgttaaaagaaataggatcccaggaaggaggtagtgagacattaaaaacaaaaaatagggtgcgggtggagggagagagagcatcaggaagaatacctaatggatgctgggcttaatacctgggtgatgggatgctgtgtggagtaaaccaccatggcacacgtttacctatgtaatacatctgcaaatccaaatcctgcacatgtacgcctgaatttaaaataaaagttgaaagaaagaaaaaaaaaaaaagcaagagatctagttgatagtctgttttactaatgattcactgggtaaccctggatcagtcttcttaactcgaagtgaagcgcccagtaaataaactcccaaaatgccttccaaggaaaatattttgttgccaaatcaatttgctctcttaatgacttagcagacatgatcttggtgattatatgaagaactgcataattacaagtattcacaggaaacctggtatttgcctatcagtttcggatcctatgaaggtttaaatgagtctaatatatggttctttaaggatctacaaaccagtatgtattttagaaaagctagtttttgcatgaggaggataggttttagaatgtgagcctttccagcatgttactactgtctttccacacttattcggcgcccacactgaattgggaaggtgctgtgtaaaaacctggacaggacaatacaaaaaatggttctcagcgccactcctcctatccttacatctcttttctctccaaactgttcgagaatctgatagaagatctccagagtagcgtcaatcaactgcacaaaggtctgcattacaacatacagagagagacatatgggcttgtccagctcttcagagcaaggacggcctgatgcagactttccagacctctaacataggttaaagagaaacgaagcaaacgcctggtgaaaagctggaaacacctcatatgggtccccgcctggcctctccaaagcaaatgcccacctcttccttcagtcccctgggggcgaccgccctgccccatccccgcagtcgcctgccggccctgacctcctcgaactgctcgctagagcagccggcgccgcgagcctccagcagctcccggaactgctccagagtgacagactcttcgccgcggcccagccgctcttccagccagcgaaacaacgcgccgcgatgcctcgacaccagcgactcgcaggggggtgtgggcagcaacgctgcagcagcctctcgcagcctggccggctccagcagcgccgcggcgggtggtagcgctggagccgcgacgcccgggccgggggtcgtgcccgagaccgcggcccagtcctggtgtgggccccagccctcgccaccggcagctgccgcttcgtcttcactgctgtgactcggagcgttccccatggggtctccgtcttgggcgcctggctctgcagccgccgccgccgcctccccgcctcgacctgtcaacctccgacagcagctggcgggcggggacgcggaggagacgacggcggcccctgcggcttccggcttcctggccgtcaagcgacgaccgctgtcgcaaaggcgccgtcacgtagataggcggcctctaccaactcacgacagctaggcggggagcgccgcctcaaagggtgcaaccttgatttcccagaggacgagtctgtctcagtatctacgtcattccgtagcctccgctgccgccatctttgttggggctgacaacctgcaagccaagaagtacgagaagggccaggcgcggtggctcacgcctgtaatcccagcactttgggaggccgagacgggtggatcacctgaggtcaggagttcgagaccagcctgaccaacgtggtgaaaccctgtctctactaaatacaaaatattagccggacgtgggggcgcgtgcctgtaatcccagctacttgggaggctgaggcaggagaatcgcttgaacccgggaggcggaggttgcagtgagccgagattccgccagtgcactccagcctggacaacaagagctaaaactctgtctcagaaaaaaaaaaaaaaagtacctggaaaaagtcgcagacagcgagcttttcgccagtgccaggaatacagataaaacgagagagactaagggagggagcgcgagcactagcgcgcgagagagagagcgagagcgcgcgcgccgatgacgtcacgctcggcgtctcggccatcttagctgtagatagaggcggcaacctcggaagtgcggagcgggtgggcctatatagatgttgaggtgcggaggccgtgggcttttgttgggcctggctgtagccgcagcagcggtaatggcagcacggcttatgggctggtggggtccccgcgctggctttcgccttttcataccggaggagctgtctcgctaccgcggcggcccaggggacccgggcctgtacttggcgttgctcggccgtgtctacgatgtgtcctccggccggaggcactacgagcctgggtcccactatagcggcttcgcaggtatcagcgaggctgctcacgcctttctctccgctggcgcgagccagtagccacctgcgcgtcgttcgttggttcattattcatctatttccccccccatccccaccccacatccatcaaacccgtgcggtgggcgggacgagctgcatgcactatccttctaggctctctggctctggcgggactgtgggccagctctgtcatccaccaccgccctgcgtgacttacattggagaaacatgtcttctgtctcttgttacccattacccagcgtcggaagccctaggatacgggctgtgtgccggacttttgtgggggctcttagggcacagataaacgagatcccgccccgcccctaccctcacagtttccttaataattccaaccatctcttcattatgccctggtcccaaataatctttcttccccccacccctaagcatagtgttttcaaggttcatccatggtttatgagcatgcatcaatactttattcctttatggcccgtcatatagtacatttggtctgagtcattcctgcttctagtacaagatgcacctgtttgccttccttagaaggttagggcagaggaaaggggtccagtcacctttacagtccttgatacgtagaccaaagttgtgcatatgttaggcctcaagaaacatttgtcaaattaagtttatgctggtgtccctgtgttacagctgagggggttaaaggatgcgatttgcctgaaaccctcacacctgaatactgacagaatatggactcggaccaccagtctagtgctttttttttaaagatggaatctcgctgtgtcgcccaggctggagtgcagtggcctgatctcggctcactgcaagctctgcctcccgggttcacgccattctcctgtctcagcctcccgaatagctgggactacaggcgcccaccaccacgcccggctaatttgttgaatttttagtagagacggggtttcaccatgttagccaggatggtctcgatctcctgaccttatgatccgcccaccttggcctcccaaagtgctgggattacaggcgtgagccaccacacccggccagcctagtgcttttttacagatgttgccttgccagccagcgggactgacctccaaaatttaaaaagaaaaaaaaagtgcagggcaagcctaagatcagctactaggctgacattaaataagcattttccacttgtcattatcttaggggaattgggaagctgcctctagcacttaaaatacaagccacttccctctgtctaggaagtactaaagaaatacaaaagttgacagaaaaggaatgaagtccagttggtctcgcaaatcccctgagatagtccagcaggggaagggacttactcaggggtacacagtgagttagaagcagagctgggactggaatcaaggtgttttgtcgctgctagttgaaggcagttttcgttgcgctgccctgctgcgtgctgtgggagctgtcgttggatgtttgcacaagtgtgggcataaaaccttcgatgtctggagtgctttttatttttcagtgtgctctgctgtttactgagctcccgtgttctggtattcattgaccatctttatttaccactacctaccttgtgtcaggggctgtggaatccaagatgtctgcaacatgctccccaccgcccacacagtctagttgggaagcagttatgtccacgtattcgttcattcagtattttatttctcattgagatgtaattcacgtgatgtaaagtccttttaacgtatacaattcagtggggttttttgttgtttagagacagggtctgcctctgtcacccaggctggcgtgcagtggcatgatcttggctcactgcaacctccgcctcccaagctcaagcaatccttccacttcagcctcccaagtagcggggaccataggtgtgcaccatcacgtgcagctaatttttgtattttttgtagagatgggttttcgccatgttggccaggccggtcttgaactcctgagctcaagtgattcagccgctgaaagtgttgggattacaggtgtgagccactgcccccaacctttttatttatttatttttatttttcgagataaactggttctttagcccaggctggagtgcggtggcgcaatcttggcttactgcaacctctgcctcccgggttcaatattcttgtgccccagcctcccgaggagctaggattacaggcgtgtgccaccatgtctggctaattttttttatttttaatagagatggggttttgccatgttggccaggctggacaggaaatcctggcctcatgtgatccacctgcctaggtctcacacagtgctgggattataggtatgagccaaaattcagtgttttttttgtttttttgagatggagtctcactctgtcgcccaggctagagtgcagtggcgcaatcttggctcactgcaagctccgcctcctgagttcatgccattttcctgcctcagcctcccgagtagctgggactacaggcgtccaccaccacacctggctaagtttttgtatttttagtagagacggggtttcactgtgttagccaggatggtctcgatctcctgacctcgtgatctgcctacctcagcctcccaaagtgctgggattacaggcctgagccaccgcgcctggcccggtgggtttttttttttagtatagccagaaatttgtaaaaatgtcaccactaactctagaacattcttctcaccccagaaagaaacttcttatctattagcagtcactccttattccttcctttgccaaccactatctactttcttttcctgtcgattggcctattgtgggcatttcatggagtcatacgtgtggccttttgtgtctggcttctttcacctagcatcatgttttaagggttcatccatggtgtaccagcatgtagcagtgcattattcctttatggctgaaaatattctatagatactataattctaataatatggatataccacattttatctatcagttgatggatttttggtttctttctactttttttgcctgttataaataatgccactatgtacattcatgtacaaatgtttgtgtgagctgggcacagtggtccatgcccgtagtctcagctacttgggagttggagacagaagaatcccttgaaccgaggaggcagaggttgcagtgagccaagatcgcaccactgcactccagcctgggcgatacagcgagactctatctcaaaaaagaaaaaaactatgtatttaattcgtttgatatttactgggaatttactaaagatcaggcactgtaccagacactggggaatccatagtaaatgagtttggtgtgttgtcttacctgataaaacttactagtagaaaagacagacattaaatagatattaaatagatattacacaattaatgtattatttttgtgaaaagtgttaaaaggaaaagtactggtgttaccagaggctgtaaccgatttgaagaggaggagaggaagggagcaaagtgaacaataaagaacgtggcagtggccaggtgtggtggctcacgcctgtaatcccagcactttgggaggccaaggtgggccgatcacctgagtttgggagttcgaaaccagcctgactaacatggagaaaccccatctctactaaaaatacaaaattagccgggcatggtggcgcatgcctgtaatcccagctactcaggagactgaggcaggagaattgcttgaacctgggaggcagaggttgcggtgagccgagattgtgccattgcactccagcctgggcaacaagagcgaaactctgtctcaaaaacaaacaaacagaaatttggcaaggcagcgttggtggcagctggtgcaggacaatgaatgacgtgttaaggaatttggacattctcatagaacagagggaagcctctgaggattctttggcaggagaatgatgtgatcagtttgtgtttaaagtatcagttgagtgtggtatgaagagcagattggtggggcaagaatgaatgcagggagggcttccttgaggtttgctgtaggagttcaggtgagaaaggatggcagcctgggcttgcttagatgtgggtggagacaggcagactgacacaagaacactgcttaggcagaaaataacaggacttggagactggatgtgagggatgaaggaagtgttaggaactgcaggctgggcatggtggctcacgcctctaatgccagcactttgggagggcagggcgggaacgttacctcaggtcaggagttcgagaccagcctggccaacgtggcaaaaccccgtctctgctaaaaatacaaaaattagctggacgtggtggcgggcacctgtagtcccagctactcaggaggctgaggcaggagaatggcttgaacccgggaggtagaggttgcattgagctgagattgcgccattgcactccagcctgggcaacagagcgagactcagtctcaaaaaaaaaaaaaaaaaaaaatggggaactgcattccccaggctggatgcggtggctcacacctgtaatcccggcactttcggaggccaaggtgggtggatcaccggaggtcaggagttccacaccagcctggcccatctctactaaaaatacaaaaattagccaggcatgttggtgcgcatctgtagtcccagctactcgggaggctgaggcaggcaaatcgcttgaacccgtgaggcagaggatgcagtgagacaagattgtgcctttgcattccagcctgggcgacgagcaaaattccgtctcatgcacaaaaaaaaagaactgcattcctggattgagcaactggttggcatttactgagacaggcaatactggagtagatacaggtttcctggctgtgagggtgctgataatcactatttcaatgtggactttttttttttttttaagagagatggggtctcaccctgtcacgcaggctggagtgcagtggcatggtcatagctcaaacccctgggctcaagcagtcctccttattcagcttcttgaggagctgggattatgagcattagccaccacgcccagccagtgtgaacattttgatcttgtgatatctgtaagacgtctaagtgttgttggatatacaggtgtgagccttgggagacatctgagctaaagatacagatgtggctatctttgcctgtaggtgggctttgaaaccacaggtgtggatgagattgtcaagtgtgagggtgtggacagtaattgacccctaaggctggtagacagtgaggagctggagaagtaggaggaaaatcaggccaagggaagtggtcagctgtgttaaagtttgccgaaggtaaaagaaagaatatgaccaatgccaaagagatgtgtgtccaaggtctaggagcatctttcacagaggaggtggtggggaccccatttccctggggataaggagtagggcttgtcaagagacgtttctcagaaagcagtttctggccaggcgtggtggctcacacctataatcccagcactttgggaggccaaggtgggcggatcacctgaggtcaggacaagcctggccaccatggtgaaaccccatctctactaaaaaaatacaaaaattagccaggcgtggtggcgggcgcctgtaatccccgctactctggaggctgaagcaggagaatggcttgaaagcggaaggcagaggttgcagtgagctgaaatcatgccactgcactccagcctgggcaacagagtgcgactccgtctcaaaaaaaaaagaaaaagaaagaaaacagattcttgagtggggatggtgtcagtggtttacacctgggtctgatggaaacatctctgttccaggccgagacgcatccagagctttcgtgaccggggactgttctgaagcaggcctcgtggatgacgtatccgacctgtcagccgctgagatgctgacacttcacaattggctttcattctatgagaagaattatgtgtgtgttggtaagtcgtccataggtcatacatttcatttggttgtctgcagtgtttttagggggctgagattttttagggattgggttcaagcttaaaatctgaaaaacagccatggatttgttttactttaaattctggtcgttagaatagggatgagccgcccagaaggagatggatgggcacctgcttcccccactcttagtcttgggagaggattactaagctgcttgctttggcctcagtttcgccatagccagtggttgcttgcaccatccttgaacaaccagctccagaagggcagcttccctgtctcactgtgttcgatgcatctggcttcagcacacagccagaagggcttgaagcctgaatttgtgtttcgacaaatccccttttatttggtcctctaggaggagacaaacttcgtgagtgagctgtctcccaggtggtagttatgctaatcaaaccactgtgtaggttactgcacttgctacttactgatgctacataagggacttgcttctcaaatgagacaacaccaaactgtgtcctaaagcagtgttaaagactctaaacactaggcccggcgcagtggctcacgactgtaataccagcactttgggaggctgaggcggttggatcacttgaggtcaggagttcaagaccagcctggccaacatggtgaaaccctgtctctactaaaaaatacaaaaattacctgggcgtggtggcacgcacctgtactcccagctactcaggaggctgaggcaggagaatcgcttcagcccgggagatggaggttgcagtgacctgagattgcgctactgcactccagcctcaacgaaagacactaaacactagattgcttcacaagtactgacaactgggatggccgtagccctttcttctatctatctgcagcccccacgtctcactggagtcctacttggacatgactgacttcctgaggaacaccagtatcacttcaccatcgaaacaggtctaacttggaagaattctttccttaatgcctctgaatttctgcttctgtcatcactgcttgagttaccttttctgagaaccttggcatttttattaacacctcagctccctccacatccaatcaatcatggctttttcataatatctaaagtttgtgtccatccattgtgggcctctgcagcacgcctttcttcattttctctcgtatgcccaagatcagtcttgagaccataaccctgtctaccatcgaaggcactgacctctactcacctgcgcttcagagggctgggttcttccctttcccaatgaagttgccaaaccaaggttgaaacattactgggttaataaagaaaagaaaacccaatagaaaagaataagagccaggagtggtctctcacacctgtaatcctaacactttgggaggccgaggtgggcggatcaccacctgaggtcaggagttcaagaccagcctggccaacatggtgaaaccctgtctctattaaaatacaaaaattagccgggcatgatggcaggtgcctgtaatcccagctactcaggaggctgagacgggagaattgcttaaacctggaagacggaggttgcagtgagccaagatcgcaccactacactccagcctgggtggctgagtgagactctgtctcaaaaaaaaagaaaaaaaagaaaaagaataagaatggagtccagaccggtggctcatgcctgtaatcccagcactttgggaggctgaggtggtcggatcagttgaggtcaggagttcaagaccagcctgaccaacatggcaaaaccatgtctctactataaatacaaaaaattagctgggtgtggtgggacacacctgtaatcccagctactcaggaggctgaagcatgagaatcacttgaacctggaaggcagaggttgcgataagccgagatcacatcactgcattccagcctgggcaacggagtgagaccctgtctcaaaaaaaaaaaaaaaagaacagagtcctgtaaatgggcaaagaatgccaggccaaatacttcatactaagatttgggagcacactggaagtgttcggatgcgtttggtgtgacaagtgagctggtcttgtttgaatgatgtataatgtgttgaggatggggtggggcatgtggcgggaaatgcctcagaaggattttagttgatgtcaggatcttattgaatacctactactcataagttacgggttccatcctcagggggaccagggatgaattgagtccagttcctgcccctgttagctcattctgtaggataggggccatgttaggctctttcaggttaccagaaaccctcaggatacatcagtggatgaaggtttattgtaagggtacatactgaagtgaggacagccaggaagccatcttggcagccaacatggccaggcctcaagggaaaacaagatggccttggttatgctgtggatacaggattggcttggagatgcagccactggtgatcaccattctcatgacacagattctagaactcttcctctgttgcctctgctactactgtcctctctttgggtctcatgtcagaaactcaccaaagacaggcttgtcaccatataacacagacaccccaacccccgtagtgggaaattctgtgccaggccaactcatagactgcaggcctgtgactcgggccctgattcctttctttattcatctaataagtatttaaaatgaatgctctatgctaagctgttttatttatttatatattttttcagatggagtcttgctttgtcacccaggctggagtgcagtggcacgactgcagctcactgcaacctccaacttctaggttcaagcagttctcctgcctcagcctcctgggtagctgggattacaggcatgcaccaccacgcccagcaaatttttgtatttttagtagagacagggtttcaccatgttggcctggctggtctcgaacccctgacctcaagtgatctgcccgcctcagcctcccaaagtgctgggattacaggtgtgagccgctgcgcctggcgctaagctgttctgagtactgcgcctcactagtagagagagccatcatagacaagtaaacagattgaacaactccacataggaccatgcatcaaactgtgatgtaatacgtttgggagctttggctcctttagagcacatgctcaggagtggcttcttggagaaaatgaccgttaagctgagaccggcaggtgagtgggaggcagccacaccgagacctgaggagagtgtgctgggtcagggaagagcggtgcgaaggtggggagtggggaagcacagccaagacacagaaaggaagccagtgtgctggagccccccgtgaacgaggggggacgtagcttgtaagaggctgaagaagcaaatcagttaaatggttacagggccttagaggccttgataagaaatttgcatttttgtctgctttaagaagccattgaagggttttaatcaggcatcggagagccatggtaggattcatgtttttaaaagatcccctagttgttttatggacagagaactctaggagggcatgagctgaccagagagcagttaggaggccactgccacagtccgtggtttggaggagggtgatggcagtgggaatggaaaggagtgaacagaatcaggatctgttcagaggtaggactgacgaggttttctgatggatccgatcagacagcaaggaagggagtatgatgtggatgtagaggaggaggagtcaggctcctaatgcaggtcacaggctagaggcaacacggatttgggaaagtcagggagggcgttggacttgggagacgagctgaatctcagatgcgctgaacatacgcgccactagaatcgaaggtaaagctagttcttaggggttgctccctcttcggtcgcacctccctcaagtgcttcctttctgcttctcttgccttgtggcaggtgctgcctctgaagggcatttgcacctcaggactgggctacattaggaccctgggctgagagaactgacctgtttttccttctggcctataggctggtggaccacttgctggctgctgccatagcttagacttttacaaattctgacaggcattttaaagccgggcacagtgtgacttacacctgtacccccatctactcaacaagctgaggtgggaggattgcttgagcccagaagttcaagactagcctggtcaacagagtgagaccccatctctattataataaacatttaaaaaatgttagccaataagccattcattcatcaaacattaattgaatacccagcgtgtgctccaagcacatggaagcatggagaaatgaatcacacatggctgtgccctcagggaagccttgtctggaagtgagagaggtttgatggtttctgtgctgaagggctctgcagctagaagagggatgcagctgtgtgggggcttgtagggtgctaagaggttggtgtgcaaggcaccaggagtgcctgcagtagaagttcttattaaacgcgcaccagcaggactgaagtcagaaaccctgggaacttgtgccttcccacacctgcctcagcagctgagtattcactctcactcacatctgccttcctgtcatcacagggagggtgacaggacggttctacggagaggatgggctgcccaccccggcactgacccaggtagaagctgcgatcaccagaggcttggaggccaacaaactacagctgcaagagaagcagacattcccgccgtgcaacgcggagtggagctcagccaggggcagccggctctggtgctcccagaagaggtaagcaggctccccttcttctcctttctgcctgtcccaaatccaactcctaggccatcctgcctgcagtattcagtgaattcaggaattgattgttaaccctggggagctttttcaaaatactgataataattctcaactttggctgcatattagatcttctggggaattgccgaaattacggatggtcagacctcactccactcaactgaatgggttgagacttggacttgaggcctgggcatctttttattttttccgaattctccaaagatcctgctgacacaaccttgacccgggaatgagaaggcacaagcaggatttcttgctttctttggcctgctcagccacccacgggctttggtttcctgtttgacagcacaaatcatgcctatctataggagagggacgaggaggtggggagggtacctgcagtgatggcttcaactgctgtcttaaaaacaggtgaggcgggcatggtggcttgtgggccacacctgtggtcctggctacttgggagactgaggcaggcaggtcgcttgagctcaggagttggagtccagcctgggcaacataacaaaaaaacagtaacaaacaaaaaaaaccactgcaaattcggagttctcagccttaaatgagcggagcaagggcaaaggtagcaggaaggaaagctccttctttcctggccgctagctttgaagagacagcttctccagtgtcatctcaagaaagaggggactgtgagaacctggcctgctcactttatggagagaagctaagataggcgtgggccttcctgtgacacaggcctgaatgcaggtagcctcagagagcactggtctctgagactccaggaggaggagactccaggaggcctgcgtgcgttcagatgcttgactttgcttccttgggccctgcctccttttccctccccacagccttcccctgtgtctcctgaacctcttcttgctttcatgactgagtagttcaggctctgccttccccacaaaacccttccagggccaccctagtgaactgcggggccctatccctgtgcctcagctcagtttgttgtcttctgttcacctgtgtgtgtcccattagactgagaggaacaagtgccgaaggcagggacaaggtgtggagtacagatccccaatgatgggatggaggctgggtagaagagggaggcgtttgggtgacagccttgttcttggtaagctagaagtaggatgttttctcgctgggggcagtttctctgacagcaggcaccggaagctgtctgaggcgtcagttccaagaacctcagtttctttcttgcaaggcctctgagtccatcagagactgagcccagtgccctgaggtgggcaaggcccctgcccaagataggagggtgctcaggttgttgggccacagctgaatcctccgtgtctgaagcctagtgccatcaaggactggacctgtggggcacaggacagcttgcagctacactctatgccaagggcttcccagagaaggccgacccaggtggccaagggccagggcccaattgcccacccccagccaagtgccccagagaagaaggtgaagaccctgacctgcgctgggttgtagtggggaaggaagaggacagtcgcacccagacactgcttctgagaagctcacaggccagcaggggaagccctttcacagctgttgccaccagtgcaggaacgtggtgctgcctcctaagaaggggcagggcaggggctggggagcacagtgaaaggaaccatggactgtgcccttggcctggggaaggtggtggtggccctgcaggggaagctggaggatgttaggagagagcatgaaggctcaggggctgagcgctgtagcctgctgccttgggaaacactctggtaggcttctacttttcagaaggcctggctctctgcttcctgctctccccttcccagagactcatgagttctcacatttaagaagtcctctttccgtctatccttagtggaggtgtgagcagagactggattggcgtccccaggaagctgtataagccaggtgctaaggagccccgctgcgtgtgtgtgagaaccaccggcccccctagtggccagatgccggacaaccctccacacagaaatcgtggggacctggaccacccaaacttggcagagtacacaggctgcccaccgctagccatcacatgctcctttccactctaagccgtagcctcttctgttaataacacacagagagctctgccaagcacctgagtaggcccttgacacttgtgtgccctgggatgcctcctggcgcgaatcaggagggtctggaaggactctggctatattctgcaaatgtggctcatgccccttaccgtggctcggcgttgtggtgcctgagggacagccggccacctgcccagtactggtcagcttttcaacactattccctttgacctactggccatcttcctcacagccctcagatatcaacgggcacaaataagaccaactcaatttccacttgaatttacaaccaaaagcctgctgagttgattacagctgggccaatacagtacgaggcaataacaaattagtgtgggttgattctggaattggaaaagcttttgcttgtatggatacagcaaatccagatgtctctgaacaaagcaacaatttaaagcaacgacattttctgtcctttaagcacttaaaatcaggtgtggtgtgttttcaaaggcagaagtctgcattttgagcaaaaggtggcttcccagctctaacaaggtaactggttagcatgacattaaagcttgggcaaggcttcaaacttaaggtggctgggcttgctgcttgtccagtggtttgtatgtccagcgtcatctggcaatgtcatacctgttacctcttgactacttgtgaaggtagatgggggcaaggagtgttcctacttcagacagagaagtgggaccagcactaccacagacagcgccacggcctctgtgcatcgcctcatcagagcttccacccagctccctttgccgctcagtctcaccctcaacatccaccagcttcctccctctctgtcactgtctcctttttctccatcattcatttcactaaatcgctttccagattcacagactagaaaatggaggctgcctccccttcactggcagacccgtactcactgcccctgtccccttcactggcagacccgtgctcactgcccctgtcccctcactggcagacccgtgctcactgcccctgtcccctcactggcagacccgggcttattgcccctatggccacagctgttccttacacttgggctctggctcatggctccttttgcctgcccccgccatcctcctcacctgcccctcttgtacctttaacctctccccgtctcctggatcttcccccaggtatgcatcaaacagctcacttctctcacatcataaacattccctcaactccagttttggcttatactcactagctttgcttttcagctccatttgctctaaaaatcaggagaaattctgcattggcacattccgtggtcacatccagttcttacctaggctttgtcactctggatactgtggaccgtggggtcctccatgaaaccctcgctgggctttatcctgcttccctttttgcctctgcccattccttcttaattgccttgagaaccccgttttgcctccacaaaccccttcccattggctcctctcactccaaatccgacagttacttagaccgtcaaacctgcacgtctactccaggcagctttgcagagcatttcaccttcccctcccatgctgcttctagttctccaagggaatggcaccaccagctacacgcagagtcagcatccgagcagccgtccacactccatcctcccttccctcctcctaacccgcctgcaggtcctgggacctctgcctccctcattctctccctttccttccctcttatctgtccctagtactcttcctctggcctaggctgtcatttctcacttggattactgaaggatcctaactgtactccctccctccaatccctcctccacactgctgggagccgtctttctttctttctttctttctttttttttttttgagatggagtcttgctcttttgcccaggctggagtacagtggcgcgatctcggctcactgcaacctcggtggcacaatcttggctcactgcaacctccactccctgggttcaagcgattctcctgcctcagcctcccaagtagctggggattacaggcacgtgccactacacccagctaatttttgtactcttagtagagatggggtttcactatgttggtcaggctggtctcgaaatcctgaccttgtgatccacccacctcgtcctcccaaagtgccaggattgcatgcgtgagccaccgcacctggccaagctctttcttaaagatgatcaaggcatcccccatttaagcctcctcaggggctcccctgatctataaggactgagtgccagctcctctgctgcgtgccacacgaggcccttctgtggcctctctcctcttaggcctgtacctttcccatctcctcccatgtgcacctcctgtccagcctccctctcactgcgttatgtctgcagtgccttcacacaagctgtttcttttgcctggaatgacgcttcttcctccgttgaattaatccaccccgtattgcttcaatattcagctcaatcaggcccctcttgggagccttcattaactgttgggccagcagtgagctatagacgcactttccctgctccatggctgtgctcatatcacagtgggctcttaccatgaacttcctatcaacctcttgcactggacctcagacactctgaggacagagccccagtgtgattcagctccatacccctatatccacatgactcagctccgtacccctatatccacgactcagctccatatccctatatccacaactcagctccgtacccctatattcacatgactcagctccgtacccctatatccacatgactcagctatgtacccctatatccacatgactgagctctgtacccctataatccacgactgtccgtacccctatatccacatgactcagcgccgtacccctatatccacatgactcagcgccgtacccctatatccacatgactcagctctgtacccctataatccacatgactcagcgccgtacccctatatccacgactcagctccgtacccctatatccacatgactcagctccgtacccctataatccacatgactcagctccgtacccctatatccacgacccagctccgtacccctataatccacatgactcagctccgtacccctgtatccacatgactcagcgccgtacccctgtatccacgactcggctccataccccgatatccacgactcggctctgtgcccctatatccacaactcagcgctgtacccctacattcacgcaactcagctccgtacccctataatccactttactcagtgccgtacccctataatccacattactcagcgctgtacccctatatctacatgactcagagccttaccccatatccatgtgactcagctcctcacccctatatccacgtgactcagcaccatgcccctataatccactttactcagcgctgtacccctatatccaccgcacctagcgtgtgggaagttcgtgcagagttgtttctttttttgagacagggtcttactctgttgcccaggctggagtgcagtggcgtgatcatagctcactgcagccttgacctcccgggctcaaaaagattctgccacttcagcctcccgagtagctgggatgatgggcacgtaccagcatgcccggctagttttttatttttgtagagatggggttttaccttgttgcccagcctggtctccaactcctgggctcaagcaatctgcccacctcggcctcccaaagtgctgggattacaggcgtgagccaccgcactttttggagataaggcaataaaggcacatagaacttaagtcactgagcatggacctgagcctagaactcaaagctctggatgcctgattcggtgccattttcactcctccatatttctgtatgtctctgccctccctggggcaggaccaggagcagacagaaagaagagctgaaattaggattttcttctgagttctaggcagtccctgagctcagtgctgagacttctctattaaccagaaacagcccccaactccatgctaactggaaactagttactgcccatgatttagtcctccttagtcattcagcaaataacttaccaagaacctactatgtgccaggcatcacgttagggttgggtggtcgaggaagcaaggcttccgacctcagggggcttatagtatggtggaataaacccagtagagcagccagaggctgtccttgcggtaggaatgcagggagagtgtgagggccaggtcccaagatgttctgatccttcaaaaaacaaacaaacaaaaaggagcattagtcattccagccagctgcgggctctggccgtgcctagagggtacctgatctctgactgatgcaagagccctgcgtgcaggctccaggacagacttggctggcttcagcagcctgctctgttccttgctcagttgagaattcatttcctttttgatacttaccttatggtacttaccttcctacttaatctggtaacacatctctcatgtcagggcaaaggattcagcaaagaattaggttcagcaagagtaggttgtcattttaatggcctgaagggctcagccatgagaagctggtaattactggagaaatgcctggcctttccctctccagtacaggtggccctgggcaaaaccatgggggaggaagggcaaggccctgatggaagccacagataagctcagcttaggctgagcatgcagttagacttgctggcagaaggaagggaaggagaaaacatacatattgggcaactatgctgggccaggccttgttctcatttaatctctatgcctgccttgagaagttcccattttatggcccagaaaaggggcataaatatctccccacctcttctaatagttacatcaaccgtcgggtgacagagctgggctttgtgatgcgagtctgatctctgccacaccagtgagcacagtgtcaaggcaaagcctttgcagctgcactccactccaacattgtgaaggaggccgggcgcttataatcccagcactttgggagcccaaggtgggcggatctcttgaagccaggagttcgatggaggccagcccggccaacatggtgaaaccccatctctactaaaatacaaaaattagctgggtgtggtggtacgcatctgcagtcctagctactggggaggtggaggctgcagtgagccgagatcacaccactgcactccagcctgggcgacagagagagactctcccaaaacaaacaaacaaaacccaaaaataaagaagtcatcttgaaagaagtttcaacatttgccttttcattctgagattacagttttctataaacatctaagagtgaagagtctgacgttttttggtcacagctgagccactgcgtgacccccgccccgccccacactcactttgctctaggcaaagctgtactctgaaagctggccccaatggggaggttaggactgtgcctgctcagaagtctgtgggtgcctcagagaagggcaacaaccctaggctggaccctagccttgagagtacttcctactgccagagcccccagatttcttccggtggcagcagatactgccagaagagcctgcggtgcacacaccagaatccgggtacttggatgagaaggacacattactgatcaccttcctccaggcaaccctgtcagttaaggactacagtcccgcccccattatgtagatagggaaacagaggcaaagaagttaggaaactcgcccagaactctcagctcatgaataaaaaagcagaactaaaacccagtgctctccctggctgggcaaacgtgtggaagttgatgtgcctggttactgtttgtgcttcgcttatcataaccagtgacagcgtggttagcactgttcgcctcaagggcagctgtgaggattacttgggattgtcctgtggaaacacttcacatgcatattaactaggagaaaagccactggagaatgagctttatgagctctatcaatcaccacagctagtctgacctaggggtaagcaaaatggaagacaggaaaaagggaatacatttgctcaggacagcgtgagggccacgtgagctgcttgattggtagtgatttgtacaggggctttatggatcactaggttttaatttgcaaggcctgaaactgtccttagcattctctgaaacccacagtgccagtcgcccttcacgcctcggccagcagaaagctcctcatgagtggatcctcttgagaacttcagaggggtcaggtgacggtgactgagactgcctcagtgatcacgctcggtgctatgagctgaaatctgggccaagggcacagtaagttcaggcagctagtatgtttaaaataactacttttcgggagctaagccatgaggacgtaaaggcattaagaatgatacagtggactttgggggctcaggggaaagggttggggtgagggataaaagggtccagtgtacactgcttgggtgatgggtgccccaaaatcctggaaatcaccgctaaagaacctcacgtaaccaaacaccacctgaaccccaaaaacctactgaaacttttaaaaattaaaaatacatacataaaatagctacttttactgctgtcaacagcatgttcctgaaaaatgttggaattcaaactttctggagggcagctggtcaagaaacttattcacgtcaggagttttctaaaatttgtttttaatgcttattggtacttctgcattagaagtaactacaaatgtcttattaaagtttccactttaaatgcacaattttacttcattttattataaggaattgttacagaaaatgcaaatatcagtatttgaaaaatacattccattacacagactccaaagaaacaatgctgataagcgccgtggtcctctatgataccatcaccccacactgagcaccaccccgaaggggctggaagccaggtgatccacccaaatgtgtgcctgcagtttctgcccagctactgcccctcctctgggatcacacagggatgtcgtaacagccaactccacacatctgccaaaaaagagcaagtcatcaaggcgagcagtctcgactcaagactccctagctgcagaaaaccaatgttgtcagttgtaacaggttaatatattatttatgccacacaaaaaaggaatagtacaggcaatgatcttccaaagaaagtctttaaggcatctgtaacttctgggaatttcagggtttttatcttgccagtcagctctcactaaagtacttccacagagtgagaaggtggctcccaagtccctttggtgagttggtgccacctgcttcctctgccaccaggctggggtggggagctttggtgcttcaggtagttcttctgggacttgtcccaagggaagcaagtgtctgtcatggaaacattacccttccttgttcctgctactgtcacctgggaagttagcgttagcttgcctttcagggtgaagcattacatagttcaaaagtgttctttttctccagataaaagaaacctagatggaggtcaagctctcccctttcccaagacgttccctccactccgtgcccgtggagaagattagtgcagaaacggttcaatatggcaggtgtgggacatgagcggggaggagtggagaaaccacacacacactgagatccacacagggacccattcagggacaagagtgaggacacagaacggggtggtcagaaatgactcggggctctgaggtagaggactaaaggtcacgtagaccccactccttggagagaacgtggcaggtgaactgagcaatcgaatccagcctcaactaaattggtaattggggttgaccgtgcacaggcccaaaactccaaatggaacacatgttctaacacatcgttcagtgagacaccacgaaaaagatgactgaaagttcaaaagtcctaagtgtaggcacttaagtttatgggaaatttcggtgttagaggatcatagcaaattagtttaagccattcgatttatatatagcacatggtccgtacctttgttttaaaaacaacgacaacaaaagactgttaggaatacactggataataaatctggcgatgagcaaagggcagttgagagcacattcagcataacaatgttgactgttgcagcaaattatgtttcagtaaagtttacttttcctgctctactcattcagaagtggcaactttctgaatgaatttaagtttttgctactagtacttaagctactgatgaaaacttacaacagctaggcaggtttgtacgcaagtgttgacagcagggagagcacgggaagggctggaagcatgcctagtcccagccagggcagggcatgttggagtcagctcccactcaagcagcctgctgagtgcagcccagcgagcgtccgcgtggtcggggggcttcctaagtctgtggaaagaggcttttcctatatccacatggatgcgccctgaagccaatggaaaacaggactcaatgttctcccagtccatagctggtcagtaccattgctatccctggactcaggcttagaagcaagtttgaatcaacatatttgaaacatgatcttaagattctgagtgcaatgacaggcaagattgttattgaaattggtatggtagggcatgggcagaacaatcggcctcacccttgactcatctcccacattccttttaaagaacaggtatccatgtaccaaccacttcaattcatatccgaatcatgattctcttactttctaacttaggtaaccaagctacctaagccctgcctgcttccttatggccctttccaggtaatagaaaatggaaactgaccacatgcctcacatggccaaatgtttgccaagactagcagagtttttcttttaaacattctgtatgaaatatgtcagactgggggacgggggatctcttctaattcattgtttttcttttaaacattgtgcacaagcttatattcacatagaaagcatatacatcttataaatcacagacttttttttaagtagtactccagtttatcagctcattttacacacatatttaggcaacagaatgtataaatctaccgcaatacagaggacacactatccagaaaagaatgaacaaagaacaggctgttgcaaaaatatttagtccctttacacatatagtcaaacttcattaatgcaaaaaaatgtagtggttattaaatgtctgaaagaatcagtatgtatgattgagattgttaatctctgagtataacacatattgttcatctcagagttgttttgttttaaagccgtggtagatgcttctctttaaatgtgcattttttagaaactggccaaaccttcaaaagaaaagtttaacacctcacggttaatatatgtactaacagcgatgaacgcccaacaagttctggcagcctcatccagcacacaagccagagacttccaaagtaaggtggcgcacacgtggccagggcccttggctggtggcccttcatggggcagggcaagctacacagaactgggaccaacagcactcgcagcatcactagggaggatttcagcaagaagcatttgtgtcaaggacataggacctgccggcctgaggctggagatgcccttggggctgaagccttggtgactccccctctcatcacttggcctgtatgaatctcttgctctaaaagatgctctgtagagtttttccttggagattcgtgtgagctgaggtccagtcaaagctgatcattagaatcactgatgcagggatgtgtgagggtatttttgaatatggatttttaaattggaatcaccgacaatgcagctctataaaaagtgcagcacagtaaaagtgcatttcctccagcactctccaacagcagagtgactgaggactccacagacaggacgcagcaagacgagagaatgagacggctgctacgaggtgtcaagcggcccagctgcactcctgacacctcagtagcatgaacactgtaaagctttcagttgttaaggccacgatttttcagctctcatctttgaaccctgttaagaaagatttcacctttttaaaaggggtagctcactaaaaatacagcttagcgtaaaaagaaaaaaagacttcagggcaagaggatcctattatctttatgaaaacactgtgcagaaaagtccacagccacttaccctagagtaaagccagctcattaagcagccagcttcctacgctgagaggctctgcctcatcagtcagcccaggcgggaagacttcatgaatgctctgggatggacaccaagctactggaaggggaaatggttttccaagtgtccctgtatgttgctagcagaatggggagaggtctaattcctaatcacatttaccacttaggcccaatggcctggtctgatgagtgagacatctagtgaaatcgatcacagtctgacacacacactgacaatcatatggaatcatttgaaatgggatctatcacaccatggtccttaatcgttccagtctattgccgcaggaagacacccgccagctcctgctctgggtggggtcaggctggtgagcagagcagctgctggggaggtgaccaaggacgtggcctggaccctccggggggctcactaagaaaccccacccagagtcagtacatcaaaacaaatgttgcaaacccgcacaggcttgttcagatcaaactttataataggaatctccttggtcgagcatttatggcaaagaagacgtccgcagtgacgactgtggaagcaaagaaaggaagtatgagaggagcgccaacgacagactctgcttcctggcacgtgaggacaaccgcagcagggcctggcagccaaggcgcccgcaatgctactctggcaactctgccaactgccagcccggttaccacaattcatgtagaatttttagtctatgaaaacaaaactctagtcaatcatcaagttaaagcaatactgaagaaggcttttttttttttttttggaagatcaagagcagctcaggccaggcatggtggctcacgcctgtaatcccagcactttggaaggctgaggcaggcgcatcacttgagggcacgggtttcaagatcagcctggccaacatggtgaaaccccgtctctactaaaaatacaaaaattagctgggcgtggtggcgtatgcctgaatcccagctgctcaggaggctgaggaataagaatcgcttgaacccgcgaagtggagattgcagtaagccgagctcgtgtcactgtactcagcctgggtaatagagcaagactatgtctcaaaaacaaacaaaaagagagcagctcagcactatctttttttttccttttttcttttttgagatgaagtctcgctctgtgggccacgctggagtgcagtggcgtgatctcagctcactgcaacctcttgtctcagcctcccaagtagctgggattacaggtgcccaccacgacccccagctaatttttgtatttttagtaaagacagggttttgacgacccccagctaatttttgtatttttagtagagacggggtttcgccatgttggccaggctggtctcgaactcctgacctcaagcgatccgcctgcctctgcctcccaaagtgctgggattacaggcatgagccaccgcacccgacctatctatctcattttaatgggaacagccccttagttctcggcaaagcggcccatactgaggcacaccatgagggcagtagctcatctcagctttggtgcaggcaggaagtcaggaaggatggcacaggcctggcaggctgcctggaaactgtgcaccttcagcctccagcaggaaagccacccgtctgcaggctccctgccttccctacatctctgttcctcagtaggatccttgggtgtgctcatctcatccctccatttggtcaaggtttgcccatcaatgtgcaggacccaggcaagttcacggcctgtcctggagaaggggggaagcaatgacatcagcggcagtcccctcgctccttgccagtgacgctggggtcttaccagtggtgtttgcgagtggtgactccgaacctggcagtgcactcatagcagtaggagccgtcacaccacggaggctccttggacagcatatctgcaacacaggggggaggcccggtcccgtcaaaccgcgacggcgccacgcaagccccagggcttggaggcagcaggaacacagacccgtaagtgaggcagcgctgccacatgacataggtgacgaaggagcgataggttctaagtggttcagggccagcttcccagaggagactggagaatcagcccttgcccgggagacttggggagaaggaaacggtggtcaacgaggtgaaccagtgtgatgtctgtgggggaaacacgtagtcagggatggctgggatggaaggcacggtagggagagaacagagaccacacagctagacaaactggccaggggaacagaggatgggactaagacaagagaaattgaggaggcaaaatctgtaactcagtgactgaacacaagtgtgggatgtgagcgggagcaggcagaagacacgggtgatttccaggcttccggagagtgcctgggtctgcagtgggaccatgggcagagcaacctatgagaaagaactaagttttcacatctagtttgggagttactaatgcagacaggaatgacaatcacttggatttactggctgaactctcactctatcccaggcactgtctgactgctctacatagacaggtccactgagctcatggggacggagcagcacgtgagtccgtcagttccttctgagtaatgggatgtgtgtgctgccggccctgtgatgggcaccggtgctgagcttttcaaaggccaagtgcacggcagagggaaggtgcagtagaccagatgtcacaaatgctgtccttcaacccgactccaccacagaccagctgtgccccctgggcaggtcctgtgcatcgccatcccatggctaccggggatgtcggagcttgttttcctgcctgtctctccccactgtgggtgatgacacagcacaggcactcgagacattctgattctttctgtcacctcagcagggaagagtaaagattcacaaatatgaaatcaggagggaagcactcctttccacaaaagggtcacaggggaaggagagctgataggggctggagcagcaggccattttgaaggttctggaggatctgagtcagtctcaagaggacaggtgtgcaggtaagtggccaggacacacaggaagggtggcctgcctggagctttggcatttctagaaggttgtggggtgtgggaaatgcacaaggcagagtgctttgaaaagagactgttcacagtgaccttcccaacacgctcaaaagtccttcccttattcagagaaatggtcccagctactgccaggaaacgagcggttccgatcctaaggcatcatgagattgaaagatcaccaatacaatacatggcgatcccaacactacgactgtgcttgcactgtgagagcagagagcgggccactcacccagcagtcggaacaggagctgcttggtggcgacctggtagttgaagatgttgactccctggttgttattcaccccgaggcgagcccccgaccggacgatggcgcggcacaagttggcgttccctttcatgtatgccaggagcagcactggaaaacaaaagcacgcgcagggctacttcccacccggcccagcccggcagccacagacggagggcggaggacagccaagggcagaacagaccgctggcaggaaatctgttcacaaagtccccacagacatacgggggccccgaggctctggagagaactgtggacaacctgtagcatcttccaataaaggatgtggccacgagccaaagaattctagagcagctgccgtttccaagacacagtctttcccacgtagagcttgggctgcaagagagctgaggtcgcgcaggtggggagggattcaacacagagggaatcatctactgtggtctcagttgccttcctctggcatgaaacactggtttctccacaaaggacaaagctcttttcacccaatgtaactaaatctaaacctacgagttgtgtacacatggagaagaaaaatcagtattaggaacacgctccagaaagttcttccaccccgtggagcccgtgggaacccatgctctggccaggccaacctgctggccttccctacgaacaattacagctaactgtcgctccctctgcttccctatcccagatgccgggtttctttcatttaactctgaaaatcatacaataagatgagggttattcttcccactatcaaatgaggaagcaggcctatgagggagaatgcacccagtcaccctgctagaatgcgacagggccaggcatctgcacacaggtctctgtaaaccggggacctcaacacggagcccctccctgctgcctgttcctgtttccctgctcctgggcaaggtgctgctgagtacgtgctgctcactccctcccaggggcggactcctctgaagcttaaaaaacagtgcgcacgtagcaaaggccacaaactcctctcaagaccaagagaaaaatggtgataaaatatgtggtcccatgttaaggttcagacaaccccatggtgactccatttctgccaagaccacagaggtgagtgaatgggaatgcagcagccacacagctgcgcagagggctctgggctgggatgagacatctggttttgctttatggggttacttttccttacccgaaaaacggggatacaactatgcactgcttcccttatgaggctgccgtgagtcctcggcaagaaaacgaacgcgagagtcaccggaaaagctaggagggccacacgaatgaacacagtgatcacgggtacccagagcaaccatgagaggcctgtagccctctgcataagaaggcaccccgtgtatctgggtagtttgccactttctcagagcatgccgacacatgatctagcacatttcttccttttgaagatcctgtgagatgcttctattttcttcctctgctagaatttgggagcttgcataggaccctatttgactggacaaaaggcaaatgagggaaataaaaacaggtggagaggcctgtttggagaagggtatggatggtttcagagcgctacatgcacttgagatgggacagtgtctaaaatcagacaccccagactccacaacagggctctgtaactcacacccggagggcccaacagaactgttctgcgagctgaacgccctcagataacgacgtgtgcctgggctcttgcttttccaggaagcaaggtgcgcaagtgagacgggacatacccagcccttggtacacacccgtgctgccgtctgcatccggcttgtccagaggataccccggcatgcattctaggaagagatcaaagatggccgctgcattctccttgccatattgtcccaaaatgtgcagtggtgactggcctctgataaaacaagttggaaaagttaggaatgtatctgccatggccatcacacacaaaataaatagaattttctgaactctgtgatggtggataaatctaaaagacacaaaacaagtcacaaaagtttttctttttcttattttgtattttactgtaacctaagtgcatgcataacaaaagtttttttgtttgtttttgagacggagtctcgctctgtcacccaggctggagtgcagtggcgcgatctcggctcactgcaagctccgcctcccgggttcacgccattctcctgcctcagcctgagtatctgggactacaggcgcccgccaccacgcccagataattttttgtatttttagtagagacggggtttcaccaagttagtcaggacggtctcgatctcctgacctcgtgatccgcccgcctcggactcccgaagtgctgggattacaggcgcgagccactgcgcccggccaaaccttttaagaagcattttttattaaaacaaaaataccggtaccaaaagtaccaaaataaagtacccgaagctggtgaggtgccccagcggccggttttgcagctcctccctggggctgatgggaggcaccagcaaccagcagctctgagcagcaggccaggcgccgcggggcctactcgggcccaacgcgctcacctgagattaaaggcttcggcgtccactgtgcactctgtcaggagaacccggatgttgttgagccggccgtgcatgacagcaagatgaagagctgggaagtaaatcctcttactatgcaagcccagaagcacatgcagaaaaacctccactcctcctcaccctcacagacctctctgtaaatgggacccggccacagcagcgactggccacgcacagagccatcctttctggtcttcaccgccctcaaggatgcatcacaaatgcaatctcatgattgctctgtgctgtgccttctgcttcagcagttacccaaaggtgagatttaacagtttcccaaggaggcagtgtgggcttccagggctcccactcagatggggaggctgcccaaggcctgggcagtcgcaggttggatgctctacccagagcacttcctgtcacagctttgctcctgtaaaagccaacctccccagtggggagcagacccaagggtgcactgcacccccacccctagaatggagggatcgttcaagccactaaagaatgactgggagttaccattgtttccattctcatccacggcagcaaagtccacgccattctctaggaggactgagcagatggtgggcaggtcctgctgggcagcaagatggagggcagtctggcgatgcttggttaattcgttcactttggctcccgcaagaagctgttgaagttcattacatgaacagtcagtctctctgccacaatcaagatcccccttatgggggccgagcctgcttgtcttctgacacccacagaggctgatggcctgccctgctgacagagctgggagcataggagcttcacacacactcctgctgaagcagaaaccagcaaaacccgtgccaagggcaaactggcaattacctatcaaaatgttaaagagccattccttgggatgcagaaactctacttctaaggttttcgtgtataaaagctgtgcaggactgcagtgatggccgctgtactatctacgggtgtctactgcttggaataggaaagcctgaaggcaaaggggtttggttgtaaaaaattgtaataggtacaaacagtagagtaagatgataaatatttatcgattaacatggaaagatgttgatgacaagtaagtttaaaaaaccttgcaaattagaagatagtatgattccatctggggaagacagagctctgtgtacacacaagcatgcaggcacagaggcacttggaaggtgtttcaaagcataaatgccatactccgaagagctgggactcaaagagagacactatctgtttcacatccttacatgctttgagtttttccacaatgagtatgtactatttcactattgttttctatttattatttcttgagacagcaacttgctgtgtcacccaggctggagtgcagtggtaccatcatagctcactgcagccttgaacgcctgggcttagatgattggcccacctcagcctcctgagtagccaggaccacaggcatgtgaccctatacctggctaattaaaaaaaagaaaaattctgtagagacaacgtcttgctatgttgcccagactggtgtcaaactccaggcctcaagtgatcctcccaccttggcctcccaaagtcctgggattacagcataagccactgcacccggcctgttttttaaaagaaagaacacaggccgggtgcagtggctcaggcctgtagtcccagcactttgggagactgaggcgggcggattgcttcagcccagaagttcgagaccaacccaggtaacatggcaaaacctcatctctacaaaaaatttaaaaattagctgggtgtaatggtgtgcacctgtaatcacagctactcgggaggatgagatgggaggattgattgagcctggcaggtcaagcctgcagcgagctgtgatcaggtcactgcactccagcctgggcaacagagcaagaccatgtctcaaaaaaggaaaaagaaaaaaaaaagaaagaaaaaaagggacacaaagaattacagaatcaacacagccggagggacctttacataatacctattcgtttagtatttgaagttcgtcatcctctttctgacaaagtttaaaaaacaatcgctgtaaacagaaaatacatgtagtctgtagtcagaacccaatttgctgctgctgaggtgtatggccacccctggttcctccgtgtgtacaggcactgcctctgggaaaatctaggtgctgcttagctgctctggttaggaccctgacttctaagtctcagcctccccagaactctgggcgcccagtctaatcactgatcgataagacatatgagtggatatgggactctccatacgggacgtctcacagatgtatattcatggtccctggtgctgtgttagggatcataactggccccacagctggttaactgggaggagagagtggggaaggggtttcagtatgaacagggtcaaacaggatgcagcatcaattcagaggaaggagcacacggacactggaagacccgctgtttctagtgtttctgggcgatcctatcatctgtcatgccgggccccaggaaggcggggtccttggtcagggaccgtaacctcctccagccctacagaggcataaagactgatgaacacgaggccgattccctacgactttgggacccagctccgcctccttggctgcttcccccacatccaatctgttcctggcaccatcatacccaccgctccttagccctcagttcacactcactgccacggcctccgctcggtctcgtcactggtgagcccgccccacacctgtgtgcctcactcccaaggcgccttcttcaaatgctgcctcagctcaaacacaatcaggtcacaaggcttttctaaaaagcacttttcagaaacagtgacaccaaggcgccaaaggctgctcaggtgccttagcggccagttctgcggcatgtgtctggggctgacaggagggaccagcgacagccagctctgaggagcagagaccagacgatgaggccctgtctcagctctggaccttgttctctcagctcaaacacttacaatggtttctccactgcctaaaagatactggctgctcacagttctcggtttgaaatgtgacaccccacgatctgctttcttcctgcccctctaaccacagctctttcaactctactaaaacttcaaccaaactttcctacgtaaacacaccacatgcacttcccaatctccacatctttactgagaccctccccggcctgggtggaaaaagcaggctttggagtccaatggaaaaggctaaaatccagcactacttgcttagatagcctcgggggtaaaattctttctcggcctacattttctcctttgtaaaatgtaaaacatttctcatacccctctgtggttttgaaaattaagagagacagctcacttcaaagtcccagttgaatgcctgacagagaacacaagtggatctccacttcctcggtgctcccaccctgcctccaccattgaaatcctgctttctggaagggccccatctagcatctggcagcccacgcagcccagtggggcgctcaggacgtgcagcccttgacaccagtttcctgagtgcaccagcctcgctccccaaattccccaggtgctttcacaacaccgggcaaagcacctgtgatgagattctgcacaagctctacaatatgctttgacaacatattattacatgcaatacttctgtgtcacttaccaaattgcggacaataatttctgagcctgcttggacagcgaggtgcaggggggtcaacttggaggcatcctggactcttgaattcacattagcgtggacactgatcaggaacagcacactttcaatatcagagttctgaactgccacatgaaggaaattccggcccttgttatccacctacagcaacaagtgcaaagcaaaatattagttcccttttcagagtacctcctgagcttcatctgcaagctgaactgaccactggagaggtcacgatggagaccttccctcagtcttaggaaaccccctcccaagaatgaacatgaaacgccatcccccaacccacccacagacccactctacacatctgtgcacagaaccaggtgtgcgtggccacacccacgtggtcaggagaagggagccactgtggcagcctcctgtagtaggaactggatgtggaaaaccaagaaaaagacaatctgaaggatagggaaacgcaagcaccaagatatcaggaaactcatggagagggaaaatggagacaagccttgggagtctctttgctttggctaaaacaagcacccagcatcctgatgccccagctgcactgccggcctgacccgagcagtcaaacaaagggttgagaaacgtggagaaagtttcctcttactgagctacgctctatacacaatgcgggagggagccaacagcagggcccgggctttgctccgctgatggaaagccaacagagctcaatgaaatcaaagcacaccgtctcctgtagttcccagagccgtcttagcatgagtgtggaggcggcagcgagggcgaccccagtgccacacacacggcacgccgcttcacaggcccacacgtcacacacggcacgtgccagtctcataagcagcggatccacaaagcgctttcatcagcagtccagtttcacactggagagaagaaacgggagaggccatttcacaccacctgagcaaacgtgaggtcaccacctacgcaatccagtcacacttgtgaaaatgctgaagacggtggttacggaagcctaagacaccaagcaatcatctccacccatgcgaggatctcacttcacgcgggtcccaagttccatctcaccttcatgaatgccactgataaatgcgccagtactctaggtgctggctggagagccaagttcctgcaggactgacctgataaacccaccccctcctactcagatcagttgtgattgtcatttcccagccaactgcttgttgcagatcaacagttcaccatcccgatgtagcagctggtaaagaaccacaaagaacaaggacagccgaggctactgagcaactgaactcctcggaaacactcaggaagttgccccaacatcacaacacaagctctttcaaagacactcctcactaggacagttaaccaacctagcaaaagcaaagaatgagctcaactgtacatgccacagaattcctacgatggagcccactgcctccgcttccatcgaagccgggcactgtcaggcgctgacacacaggcagaggagccggatctcatcctgcacggatgggacatctcaacagccacatcttaggacaggagtacaacttcaaaacaaagctctttccatgaggagacctgtttagtcggtgacatctgtctagtctccaggttccgcgacgcccaggaccatgtggagaaggtcaggtgttattcactcacctgctcagcagccccggactctcgtttgagaatggcctcggctgacttgttgttcttgaaagtcatggcacaggcaaacggggtcagcccttgtctgtctcgtacattcaaatggatatcggggtgagaaaccaacagctgaatgatgacaccgtgttggctgctgatggccacgtggatgggggttcttccttctgcatcctatggaacaaggcacagaatttaatgttcaattgcaagataaaactcaggaaaaatatgaaagggtataacttttaaatcaaatttcagttatgagaatcgatcaatactaccaccctgtgtttgactcagcttttgaagaggccaaagagaaatgactaaatgtcacttcctgttacaccacgttccagtgacccagtggtgaccgtaggaccagcacaaacatgtgtttcacatctgcagtgagtctccgctctaagccaccactccttatctggctatagggccttatatataaatctgcacaggctcgaatgttgaaaagcatcaaagggcgtaactcaggggtgctcaagtgagctactgggacattttcctaaatacagtatgcgatttgggactaaactctcagaggaaatctgtaactaagggggaataggaggcaaagagaaagagctgaaacaaatcttcctcctgttgtagtaaggacaaaggcacagagaagcacagtcagcctgaaatcatgaacgctgctagggaggtcgtgtgttcatgaagcagcagcgcctggaactggggactgtgcaaggtcctctgccataggaggaggcttccctcatgctggggctacacctctctccccggaaaagagaaacgacacacctgtgcgttcacgttggcaccaaactccagaagacactgtactgtctcttccagcccccaagaggctgccaaatgcaaaggggtctgcccatctctagcctcttcctctccttctccattggcgcctggttgtctgggactgttcacgtcacagccactgaaaggaatggggacattttaaaaaacgccacgcttggacctggcgtataggcatgctgattacaaatgtaaagcaggagcctcatccaatccaacagcgtctgctgtggccgggtctgctgtccttggtccctggcctcaaataccagagtcggggttccactcccatagattcttctgtgactggtcttgggggtgggcaacccgggcatcagaattgttagaaacttcccaggggatatgcatacatttaaagcctgagaaccagccggatgcggtggctcatgcctctaatcccagcactttgggaggccgaggcaggtggatcacctcaggtcaggagtccacgaccagcctggccaacgtgacgaaaccccctctctgctaaaaacacaaaaattaaccgggcgtggtggtgcgcgcccatcccacctcccatcccagctactcaggaagctgaggcaggagaattacttgaacccaggaggcagaggtggcagtgagccgagatggcgccattgtactccagcctgcgtaacagaatgggactccatctcaaaaatagaaaatacaaaaagaaagtttgaaaaccataaagtttgagccaggcacggtggctcacgcctgtaatcccaacactttgggaggctgaggcgggtggatcatgaggtcaggagatcgagaccatcctggctaacatggtgaaaccccgtctctactaaaaatacaaaaaaaaaattagccgggcgtggaggcgggcgcctgtagtcccagggctgaggcaggagaatggcgtgaacccaggaggcagagtttgcagtgagccaaccaagatggtgccactgcactctagcctgggtgagagagcaagactctgtctcaaaaaaaaaaaaaaaaaaaaaaaagaaagaaagaaaaccagaaaaccattagtctgagaaccactgctgtgaaggcttcctgaataacctcggctcccacacttcccacactccaagggggccacagagcctgttacgactcacacatcgtggtggggtcctgcagagaccatctggtctccccagccatagcctcctgcttcacagtctgaactggtctgccgtgactacaggagctcaggcagctcccaaagcaggacgctgactccagctttcagattctttgattcagggctgtgagctcctcccgtcacaagtgagcctggctcctggctgacttgacatgacagaacagtgactctctgataaccttaactgtgaaagtcaagccggctactggcatgccaagactatagacggatttaaaaaggaaagagccagtttgcaacaagctcactaaaaagctgtggagagatactggggactctcagacctgcgaataagaaagcaggcggtgggctcgttgttttcatcaatggctctgtgcaggagcgtctgaaggcacccaccaggtcccggaccccagcatgtggcatcacagccatgtctgacctgcagaaaaacataggttattcacaaacactgctgagcaaaggcaaacagttttattaccaagtctgagctctatgtatagcattaaatccactttcagataagatacggttgataataaattgataattactttaatctgtatcactcattattttacaaacactaattaaaatttgctgtgtgcaagttcgtgcactaggtcctgtgggacagacttgggaagtataaacaagttatgtttaatttgtgtcctttagagctgagttctagaagggacagaaaacagaaagtgtctgtgtacacatgcaccaacgggtcctcagtaacacacacctgcaattaacaggtaatctcaacaactaggtaaaacctccaggtgcacaacgccttcatatcacactgcaggcccttcggagagctgaatgagaatgtgcaggtttgcctccacttttggggcctgtcttgcaaacaagggagataaacctaagattgaggaaattatcactatggtgataatgaggacaccccatagcaaatcaaccaaccccaggagaaggctcctgaggaaacgccgccattctcttgcttcttggtagttttcttggtaaagatgacctaaaaacaaaaggtcagccaagaccatgttgaactgcaagtttctttaacatgctttcaactgcttgtccttgtcccactatgttacttgacagatcttgctcctgtgacagctacgcaggcagcagatccatctctgacacaacatatccccatctgtaaacagaggctaacgttgtgcctgtctcaccagagtggatgcgatgtcctccagattgtttgccaatgcaagccacagcggggggttccccttctcatctggcacagacatgtcagctcctcgggtgcatatggcatcaactacgagtggaagctggtttctgatggccagctggagggctgtctccccgtcctgagtcctgctaggacatgcacacccaaaccaacgtttgtggttgaacccaaagcacagaaggtgcccttctgggcattccagagtccagaatcttctgtctctaatcatattcactcacaatcattcaatattttctcagggaaattaaatgtgaaaatagtgtctgtccattctgactttttagaacacataaccatgtcaccttattgccctcggagataacatcccagcgtgctgaaatcttatagttactttttaaagcatcttaataaaatgccactccaagaaccctcctggcaaaccttccttcccccactcagtcattcagtcacttggagataaaggtaagttcttttgaaaatacaaccacaataaaaatttgactccatgtctttttccctctcaggccttgttggtggctcatttgttggaacattcttcattgtaactgaaattccttgttaaaaactgattttagggtgggccgcagtggctcatgactgtaatcccagcactttgggaggccgaggcaggcagatcacttgaggtcaggagttcgagaccagcctggccaacatggtgaaaccccgtctctactaaaagtacaaaaatgagctgggcgtggtggtgggcgcctgtaatcccagctacttgggaggctgaggcacgagaaatgcttgaacccagtaggtggaggccgcagtgagccgagattgtgccactgcactccagcctaggcaaaagagtaagatcctgcctcaaaggaaaaaaaacctggattttagattgttttttacaatgagacttgtgcaatactatgcactggtcctgaaaggttcaaacaagagcaaaggacagttcctttccgccattacaatcaagtcttttgatgatattcagtgatgacaccgcagttgtgtgtttctagagctactgtttcctttcctctaactaatatgaaacaaaaacacttttctacaagcgaggctatgcttttgacatctcaattaattgttacctggtgttaggtggagagagcggcttcctcctacctgacatttatatctgcctggtgctccagcaggaagagtgcgctcttgctgtcctgccgctgtatggccatgtgcagtagcgtctgcccatccgacatggtgtcattgatggcggctccagagcccagcagctgggctgcgatcgtgtgcatgcctgggaaacaagccccgatctcatccaggctcggcttttcccgcttcctcaacatcttactacaacagccagaccctctcagcttctcaaagccagcagttttccactggatctaacaggcttaactcaaacagaaatgttattttacaaccaaatgattagcccagtctcctctttctttctcgctccctctgtcccacccggccccacttcggacagctgtctgtctgcagacatcagcggccccggcacagccttaccagtccataatgccaggcccagcacagtctggtctcgggaatctttgaggctgaagtccggaatgatctgcaagttgttggtggcatgaagagcattggctaaatgtttgaaaaagtaaaagaacacttgatgtcaccatctgtggatcacacttaaagcttcagtagagtaagaactcaaactgcctgttgggtataatatgatcaatgctataaaaagagagtagataaatcttgtcaagactcaaagcccagaaatctgatattttggagcaaaacttacagggaaaacgaatctttttaaagcttaaaacactgactcttcacgtaagaaaaatggactccattacggaaacacgcttgattactaaaaagactaaaacaacgccctgatgatgtttcctagaacgcaatcttaaaactttccctcctacagtcttaaaacttctgtgaggaccaaaaaaagggcacatagtacctaaaacccaacctccctccagaaggacaaggctaaaaaaacactgtccttaacaaggattgaggcaagagcaaaataaacctcaggacaggcaagagaaggcgtgagggagactttctgagggaaacggcccttctgtcccacaggggctgcccctggcccctctttctggcccctctctcatggggtgcctgccacaacagggttctcaaagacagtgctcacaccgaggcacagctttgcttgacctacactaaatggcctagagaaatagtcaaataagacagacattactaccagcttaacctaacaaatgaaatgggcaggccccatcctgaaaacacacacagggaagcagcagtcaagagccagactacatgcttctctagtttgacctgaaaggattttttgggggtaagaaactagccatatgaaactcaccaacagaaaaaacatcaactctgtaactaaggatcctaaactgctgtccccaagtcaaaaggatggacagtattcccacttacttacctttctgctccaggatgacagacaccacatccggatggttataggcgatcgccatgtgcagtggcgtctgcagatggacgctgtccgccaagctggtcagggatgcggcctcctttggcagaggcagagcttcctccgtctgcaggtttgggttggcgccttgctgcaggagctctgccgtgaggttggccaggccatgccgacacgctgtgtgcaacggggtttctccctgaatggaaacaaatggccgaaatctgagcactcacaggaattcccttcacaaagagcgtggcagcctaagtgcaaaacctcgggtccttggctcatcctgccgccagctgcccctcctgacttctgttctctttctcctgagccatcgctctcagtatctttttttgtttgttttgagacggagtcccgctctgtcacccaggctggagtgcagtgtcaagatctcggctcactgcaacctttgcctcccgggttcaagcgattctcctccctcagcctcctgagtagctgggattacaggcacgcaccaccacacccagctaatttttgtatttttagtacagacaggtttcaccatgttagccaggctggtctcaaactcctgaccttgtgatccacccaactcggactcccaaagtgctgggattacaagcgtgagccaccacgcccggcccatttttttttttgaagcagcatctcgctgtgttgcccaggctggactcaaacttctagccacaagcagtcctcttgcctcagcttcccaaatagctggggttacaggcgtgaggcactgcgcctggttccacccttagtttcttcagtgtcttccccaagcaccttccgaaagcactggcttcttgacttcacctccaaggtcctctttaaccacccttcgctttgttttataattcttttttttctaattataaaaataatatatgcttatcacgacagaacaataacaagctccaagtgtcaccaaaataaatagtacaacaaatgggagagccgcgcagcccccgcccggacctaagccccggcaatcggcagccttaacgctgtggccgtcgcttcttctttagctccgtctctgtggcctgcttgtatcaatctcatcttgagctctgatcaagacctccttctcctacttttaaaagttaaaaatatttttaattggtattaccgctacctgatgcaacatttaaaacgaagtttcctctcacatttggaaccattattaccactttcatgtttctctccattgacagaaccctcccaggaaaacacacgtatgcacacacacatgcatgtgggcgtgtccacgtgtatgtccgtatgtaaacacacacactggagtgttttcaccccaacaagtggaaatgaacggaatgcaccactctgcctgcagtacggcgcttgcataaggtgcctgccctcatcagagttatacatcatcacttagaggcaagaactctccaaggcttcttgtaaaaatcagcaagatccctggcggtgatgtttacaactaactgatcacaaccagttacagattcatttgttccttcactcccactgcctcacttggctagcctaaaaaaaaaaaaatatcctttcccagcaggaatcacttttaactcttccagctgggttttgtaactctccatatttctaaccaacatgtttttattgctgcctcttgattttccagctttgaacattatctgtgggactttccactgtggcagataaggattgagtacttttacgccttgacccagagtgcgcgcttcccatcccaaatcctccccatacaggggaactgtaattgcagtgtgagcccgcccaagtatgtcctcttcctcctcctcccctgctcctcccgctcctctacccctcctcctcggggctgtcttctgttccagaccttcttcctacgcattctccttgggtgtgctgatctactccacggcttctgccattatctgcaaggaagagactctcaaacccaggtctccagccccattcttgcatctaattttcccactgcctgttagacatccctaccttaaatgtgtagaaattcaaaaatcacaatggaatttattcccacacacaggctcctcctcctggccagtttcctctgtttttccatgggttcgccgcaactgttttttttaaattcgtatttcagtgtctttggggtacaggtggtttctggttccacggataagttcttcggtggtgatttcttaatgttagtgcacccgtcacctgagcagtgtacactgtacccagtatcacccttttatcccccaccgccctcccaagcttcccctccaagttcccaaattccattacgtcattcttgcaccacaggggttttaacagctctcttgccctcgcttctgggagcctcaagcatgcgtgtcacagactgattctgcaattcctgtgaaacctgttcctttggatccaaatgcagtgtgagaggacaggacaggacaggtcattgcttgtcaagatgactcccacttggctccagcctggactccacggcacacccaccatgccagccatcccaggcagttttctcagctccagaagaatcacactacttctctgcccaaaaccctccaatggctcttctgtccccacaggataaagcccacacagcggaagccagtgttccaggcccttctgcagtgctggtctccagtgctttcaagtgaggcctcccgtttctctacagcttgggtttgacctagttttgctatgaagggtattcagagaaggaacaacagcgggtagacaatgtgggcccaagggaggtttttttttgtttgttttttgttttccgagacaaaatctcactctgtgccccaggctggagtgcagcagcgcaatcgccactcactgcaacctctgcctcccaggttcaagcgattctcctgcctcagcctcccgagtagctgggattacaggcactggccacctcgcccagctaatttttgtatttttagtagggacagggtttcgccatgttggccaggctggtctccaactcctgacctcaggcgatctgcccacctcagcctcccaaagttttgggattacaggcgtgagccaccgtgcccagcagaagattttaagttaggagatagtagagcatgtctctatgctattagaaatgaataatgggcaaagctaatgatgcaggaggaaaagaaagagacagagacacacgatggcaagagcagaggcatggagaaggtgagagggcacgagatgctgagatgctgagcccaaaacaagcagcagcctctggtgggcatggggccatgccatcactctggccggtgggcacgaggccatgccgtcactctggccggtgcgcacggggccgcgctgtcactctggctggagagttggctgtgtgcagacacatagtggagtcagcagtggaaaggatggcactgccctctgtcctgtaccaagatacacttgtctggctcagataccaagctcactgtttactgccttgcccagtgctgttgagacagtgtgcaactagatagccttgtgctggagtcttaatgtggacacctcattatttataagccacttaacctctcagaacctcaaggtccttgactccaaaatagagaattgattgatgtgggaaaggcttcttcaatcctaacgatacatgctgcttccaggtccactgtgaaaattaaaagggataatagccttaaagctgctagcagaaagtgaccgtaaaataaatgtgatcttgaagacaagcacatcctcatggtctgaaaataataaagtaaaaataactatcaaatagtacctaatgtctcagatattatgctaataagcatttagctgggcgtggtggtgcatccctgcaatcccagctattctggaggctgaggcaggagaattgcttgaatccaggtggcagaggttgtggtgagccgagattgccccattgcactccaccctgggcaacaagagcaaaactgtgtctcaagaaaaaaaaaaaaaaaaagaagaagactgcatagggaggaaatgggaaagctggtaaactcggtaacgtccaaccccaaaggtaacacttttattcataacaccgcacattccaccttgttagcgtgcgacatagactcatacgtgacaatccacagaggaaaacccaagcaaatgtgaagtgttatcaagaatcaaatgctatcgcggtaggtttgtgcacgcgtttgctaacctctattaaagtccatagcatctagttcggggtctgataacctgaacaagcactgtttcctacacaaacgcttaggaaatggctgctgaatgaatcaatcaaccaatatttgaagaaacacaaaataatctgtttcactctggctttttaaccatatgcatgtattattctgattaaaaactgaaaaaaaccacctattcccctttttcctacatatccaccactgccatttcttccatagatcaacaccattttctccggctgccctgtcacacttacccacttgtttctgtggttgacatgggcaccgttggttgccaggaaaagagctgctgcctcgtttcctgctccagctgcccgctgtagtaaacagtttcctaaaagaaaatgggcattgctgattcttctgtttgcatcaaaatgcggtcacgctgcacaacaccctgctcttccctgccaccctatgactggcaagcccacgccagacagtaggcccacaccagacagtaggcccacgccagacagtaggcccacgccagagagtaggcccacgccagagagtaggcccacaccagacagtaggcccacgccagacagtaggcccacgccagacagtaggcccacgccagacagtaggtccacgccagacagtaggtccacgccagacagtaggtccacgccagacagtaagcccacgccagacagtaggtatcatttaagtccacataggtactctctgtatgtggacacagaggctagggaatgccccaggctggagcatccacacaggtactctctgtgtgtggacacagaggctagggaacgccccgggctggaacatccaattcctccctgggattcccgctagccactgcccaggacgggagggaagttctgtccccttgctgagggtgggttagagcaagatttctcaacagtggtgctacggacattttggacaggataaattctttgttgtggggtctgttctgcacactgtacaatgttcggcagcatcctctgaacttaaagacaattagaaatgtctgtagatgttggccagtgtggtggctcacagcagtcatcccagcacttttggaggccgaggcaggcggattacttgatgccagcagtttgagatcagcccggccgacatggtgaaaacctgtctctactaaaaatacaaaaattagccaggcttggtggtgcacacctgtaatcccagctactcgggaggctgagacacaggaattgcttgaacccacgaggcagaggttgcagtgagccaagatcgtgccactgcactccagcctgggcgacagaacaagactctgtctcaaagaaaaaaaaaaaagaaatgtctacagatgttgacaaatgttctcaggcaataaaggcaggattgtgcctggctgaaaaccacttggctggatgaccattttgaaaacattttaagtcctattagaaaatgccccttaaatacttcagttttattcctaatgctttaaatatgtttgttcttggcttagaaatattttccttagcactgttactcttttctaaataaaaaccttggaaagaaaaaaatgagtttttttttctctctaaatggttttagccctaaaacagtgtttctcagcttttaaaatccatttccaaaaatgaacaaactctctcatgtcaacagctatactatttgaaattctaaataaaccaaacaccaggactgaaaacaagataaagaactgtgacagccgggcacggtggctcattgcctgtcatcccagcactttgggaggctgagttgggtggataatttgagctcaggagttcgagacaagcctggccaacatggtgaaaccctgtctctactaaaaatataaaaactagccaggcctggtggcacatgcctgtaatctcagctactcaggaggctgaggcaggagaatcacttgaacccaggaggcagaggttgcagtgagccgagatagtcccaccgcactccagcctgggcgacagagcgaaactgtctcaaaacaaacaaacaaaaagaaatgggacaaagtactactttgctttcataccatgtttttccttatccctcagagacaggaatccgactcctagttgatggttgctctatactggagactcctagttgatggctgctctaatctggagactcctagttgatggttaatctggagacgcctagttgatggttgctctaatctggagactcttagttgatggttgctctcatctggagactcctagttgatggttaatctggagacgcctagttgatggttgctctaatctggagatgcctagttgatggttactctaatctggagacgcctagttgatggttactctaatctggagactcttagttgatggttgctctaatctggagactcctagttgatggttactctaatctggagactcctagttgatggttgctctaatctggagactcctagttgatggttactctaatctggagactcctagttgatggttaatctggagactcctagttgatggttaatctggagactcctagttgatggttaatctggagactcctagttgatggttaatctggagactcctagttgatggttgctctaatctggagactcctagttgatggttactctaatctggagatgcctagttgatggttactctaatctggagactcttagttgatggttgctctaatctggagactcctagttgatggttgctctaatctggagactcctagttgatggttactctaatctggagacgcctagttgatggttactctaatctggagactcttagttgatggttgctctaatctggagactcctagttgatggttaatctggagactcctagttgatggttaatctggagactcctagttgatggttaatctggagactcctagttgatggttgctctaatctggagactcctagttgatggttactctaatctggagatgcctagttgatggttactctaatctggagactcttagttgatggttgctctaatctggagactcctagttgatggttaatctggagactcctagttgatggttgctctaatctggagactcctagttgatggttgctctaatctggagactcctagttgatggttactctaatctggagacgcctagttgatggttactctaatctggagactcttagttgatggttgctctaatctggagactcctagttgatggttaatctggagactcctagttgatggctgctctaatctggagactcctagttgatggttaatctggagactcttagttgatggttgctctaatctggagactcctagttgatggttactctaatctggagactcctagttgatggttaatctggagactcttagttgatggttgctctaatctggagactcctagttgatggttactctaatctggagactcctagttgatggttaatctggagactcctagttgatggttaatctggagactccgaattccatgtttatgcttgcagtcattccactgtacacaagacttaaattctatatctcccaatagaacaaagataacccatgactgccaaaacatcactaaaccgttaaaagcgagtggacgaattggctggtccgggtgcagtggtgtttaaaactcatcaaaaccagttacagatttctttgttccttcttcactcccactgcttcacctgactagccttaaaattaaaaaaataaaaattaaaaattaaaaaaactagtggactaagattacacgtataatgaaaaatgaaatatatcaatagaaaaaacaatcctgagcctgtctagacttaacaattaaaactatataatataaaattgacagaaccagcaagaaaaatggacaaaaccataaccaatgaaaaattttaatatacctctcagaaactgacagatcaagcagtccaaaagttagtaagaatatgtaagatttgaacagcataatgaacaagcttgatttaatgcacatagagaatgctgcatcctataattaaagaatgcatattcttttcaaacacatgtcagacttttataaaaactagttctgtaagagtctaacattcaagccttttgtttgtttgttttttaagagagagaatcttgctctgtcacccaggctggagtacagtggagtgatcatagctcactgcagcctccaactcctggcctcaagcaatcctcccacatcagcctcctgagtagctcagagtacaggcatgagccaccagtcgactcttttttttttttttttttttttttttgagatggagtttcattcttgttgcccaggctggagtgcaatgcacgatcttggctcactgcaacctccgcttcccgggttcaagtgattcttccacctcagccccccaagtagctgggattacaggcatcgccatcacgcccggctaatttttgtatttcagtagagacggtgtttcaccatgttggccaggatggtctcgaactcctgacctcaggtgatctgcctgcctcggcctcccaaagtgctgggattaacaggcgtgagccactgcgcctggctgacctttaatttttttttattttattttaattaattaatttacttatttttgagatggagtcttgctctgttgcccaggctggagtgcagtgacgcgatcttggctcactgcaacctctgtctcctgggttcaagcaattctcctacctcagcgtcctgagtagctgggattacagtgcgtggccaccagcccagctatttttgcatttttagtaaagacaggctttcaccatgttggcctggctgatctggaactgctaacctcaggtgatccaccggcctcagcctcccaaagtgctaggattacaggtgtgagctaccatgctttgggattacaggcatgagctaccacgcccggccatatatatatatatatattttttttttttttttttttttgagacggagtttcagtctcctcacccaggctggagtgcgatggcacgatcttggctcactgcaacctctgcctcccagtttcaagcgattctccggcctttcctgagtagctgggatgacaggagcccgccaccatgcccagctgataatttgttttttcagtagcgacaggtttcagtctctaaaggggccaccctggtctcaaactcctgacctcaggtgatccacccacctcggcctcccaaaatgctgggattacaggtgtgagccaccacgcctggccaacctttaattattaacttctttagggaaagggctgttttaatatccatctttttttttttttttttttttggtcaagtcttcctgtgtgagtgacacctacccatgttttatgcattgccagtactcaatactgaattacaccaaatccctctccttaaaatatccctgttattttatttagtcagatcaaggaaatacattaaaacagtgttctcaaagtgtagtctaatatggtaaatactgaagttataacccacctaaagaaaagctctctggggtacaatttttaagacggtcaaaggaattcttgagtccaaagagtctgcgagtcgccgcattaaataaatggaagtttcagtttcagggacttgatgtctgctcaattgtttgaagcacaggatttttaaaaatgacaacccaggcttttactgtatataaaattaagtacaaaataattatcctcatagtatgccgttcagtttctaaatttggggtgaaggcatttacatgccatttcctggcgcctgcagaccccagcgtcgccccttcgggaggcacgtgctttacctgtcgccgtgtcaggtgcgtctgtgtggctgccgcgctggatgagtctggctgcaaagctgttctcatcaaatgaagtcccatttaccacggggacatcttcgaaggggttcacagactggtcagaagacactgtgatatgctgcactgccagccacagagccgtgctgccctcgtggtctttgagttctaaatctagtctgaaaagcagaagcagtgtcaacagcacatacaatctttttgagacactctatactgacaacaacctggttctttctctttaccctttttcaatgacacatttttttttagctcactttaacttcttaatatatgcaacactaaagatgtttaaaaagaatgatttttcactcacaatcccccctcacaaccgccttctcacttgtgcgtgtctccctacgtactgtttgcactgcagcagctgactgaacacatattcattcccggccatgatggacacatgtaaaggagtcctgcgggatccaaaagaagaggggtcagttcaggacaggcctgttcaggatgactcacggcaagacgcaaccagaatcccaggcagaatcaccacccgcaagaaatcccacatttctacaaggcttctaaaaccatgacccagtatcaaaacctgaaaacggatctgcttatatgtgaccattattcagcggccaaaatggacaagaatcagctcaaggaagtgatctcaaatactccccaactcaatcccaaccccttcctgaaggcacagacaggattttcttgagaacagcagtttctgccacaggtgtgcagattttccctcatctcttctccatcaattctaaaaggaaactctcccccataatcttctattcttctcaaacacactcagagcagcaacaggaaagaactgatgaaagcggcatttaacccctttcactgctttcatttagcactcgggagccctgcaggagactggcactgcagagccaccactaacacacacacacacacacccccgagtcagggcccaaggctgcacctacccacccaccccccccaccaccccccacccacacagtgagtcagggcccaaggctgcacctaccccgccccccacctccccccaaaaacacacactttgagtcagagcccaaggctgcatctactacacacacacacacacacacacacacacacacacacacacacacacactgcgagtttattgccgttggaggaaaaaaatgaaagaatcaacagcagggaaagggatgcaattattttaggaaataaggtaattatcacatgatactgagatttcatgaagctacatcttatttacgtacttatctatcacataaatacattctcctgtctgacaaccaaactttacaaaaaatcttttttttgagaggtttttcaaaggtataaaatactgagaatgttctaatgacaagcgggtcccaactgtggtcagtgattcaggtgacttaactatccttcacagcccctcacaccactgtcccaagacaagtagccttttctcagatcctaccacaaggaatcctcaactatttctggaaaggggcaaaatgaacacaataaatattgttaaatatgcaaagggccgtgctatggacaaaggtagcaagctgtgcagataaagtgggagtgtttacgagaaggtaaaattgggtttaatatagagaattttctaacaattagaattttctaacaattagacctcaatagttcttcaaactatccaagcaactctaagaaatgctacaaggtttccttggaggcactggactagatgaccactctggttccttcaaacatgagatacaaattgcttaaaagctcgaaaactggctcacgcccgtaatcccagcactttgggagaccgaggtgggcagattgcttgagctcaggagttcgaggccagcctggacaacatggcaaaaccctgtctccaccaaaatacaaaaatcagccaagtggggtggcgtgtgcctgtagtctcacctactcaggaggctgaggtgagaggatcacctgtgctcaggaggtagaggctgcagtgagccaagatcataccactgcgctccagcctgggtgacagagtgagatgctgacacaattaaaaacaaacaaacaacacacaaaaaaaacctcgaagacttcagttacccaggatagaaatgttttccccaaatgcctctggttttagtagtgacactactactacacatcgatgtctgtgactttaatgaaaataagactgaataatgccaaactaaagaacatgaactccccgtatgccaattacatgctactgtaagatatcttctgagaacagtgctaagggcacagtgtctgctccccagcttacctccccttgctgtcctgcatgttggggttggcaccagcctgcagaagggcctctgcaatctgcgccatctcagacatcacatctgctgagtgtttctttgaactgtacaaggccacaaggtgcagtggtgtctcctgggcacccagtgtagcagcgttgacaaaggccccattcttaatgaggaaagtggcagcaaagagatctccttgaaaagaaataatagaagaaacagtgtcagggcaaagtattctggccagtgcttcttcaagagggagcagaaaatgactgcagacaaaggagagcgataactagatgtgtctgaaggaacctcttggggcatctgtaagtggaaactcattgagatcatggagttacagacgaattcaaaaggctctgctcaatttttggttacctgttaccacttgtcctgcctcctcacctcagtatcctttcactgtttaagaatactaggctgggccaggcgcagtggctcatgcctgtcgtcccaacactttgggaggccgaggtgggcggatcacctggggtcgggagttggagaccagcctgaccaacagggaaaaaccccgtctctactacaaatacaaaactagccgggcgtggtggtgcacgcctgtaatcccagctacttgggaggctgaggcacgagattcgcttgaacccagggggtggaggttgcggtgagctgagaccacatcattgcactccagcctggggattaagagcaaaactccgtcttaaaaaaaaaaaaaagaacactaggcttctactcttcaaaggcctccttcggtcatctctcagaagggtttccaggatccctccctacacaatttctctctctctttctctttctttcttatttcctgaccacagcttgtacctaactaagcaacacctacccccattctgctgtacttgcattcacgttcctactcagagtaatcccatgtctgttttattattataaaatttattttctttttagatttttttttttttcagacagagccttgctctgtcacccaggctggagtgccgtggtgcaatctcagctcactgcaacttccgcctccgaaattcaagcaattctcatgtctcagcctcccaagcagctgggactataggcatgtgccaccacacctggctaattttttgtattttagtagggacggggtttcaccatgatgtacaggctggtctcaaactcctgagctcaggaaaaccacctgcctcggcctcccaaaatgctgggattacagatgtgagccaccgtgcccggcctctttttagttttgtaatctcattatatacacataactgacttaataagaagtttacaatgaaatatttgaacagagtatctgtacacattactatttacaaaaatttcacatggtaaataaccttgttgtggaaacaaaatttctttctaaatcccttccattgacttacctcttggagtattacagataagagtctacctaggacaatttacagatatcaaattaagactgaataacatcccaggtctttggaaggccgaggtgggaggatcacttgagcccaagagttcaagaccagcctggcaacatggggagaccccatctctacaaaaaaaaacttagcaaggagcggtgacaacagctgtggttccagctactcaggaggatgaggtgggaggatcgcttgagccccagagttcgagactgcagtgggctatgactgtgccactgcactctagcctgggtgacagagagagatcctgactcaacaaaggctgagtaacttacagaaaaaccattcttcttcttattttttgagacagagtctcacccccgccacccaggctggtgcactggcacgatcacggctcattgcagactcaacttcttggctcagaggattctcctaactcagtctcctgaatagctgagactacaggcacgcatgccaccatgcctggcttattttttatatttttagtagagatggggtttcaccatgttgcccaggctggtctccaacccctgggctgaagggatccacctgtctcagcctcccaaagtgctgggattacaggcataagccactgtgtctggccaaaattcattaattttaatagtttcatttaccatctttgactatttatgctctgtaggagtgaaaaaaactaccttgacatgttgacaaaaggccaagaattaagatgaaaatgttaatggtacacatttgtgaaaatactttgtcagacactagtaaagagaaattgactctagattggttctacaaatacatggttaaactcggaactaagcaatctgacaagtggccatttagtgttaaaaaatacttctgaaaaaccagttaaagtttacttgtcaagttaacttggaggatgacaaggattaagcaattaaatttgttgtaagattaaaagttcagtctttcttggatttagttatatttaacatttaaaacacgcaaacaccatgtatatataaaatgtatgtttcttaagaaaacaaggcaagaatagcaaagcatcataacacacagaacagaaacctgttacaaaggcttggggcatcacgccttgctgggtgaaagcaattgctctcagtagcctccaggtggcatcaatgagctcatatcgggaaagttgggttttggggattttttttttgtttttgagacagggtctcactctgtcacccaggctgaagtgcagtgtcatcatcacggctcactgcagcctcaacttccagggctcagttgatcctcccagctcagcctcctgagtagctgggactacaggtgcacgccaacatacccggctaatttttttgtgtttttggtagaggtgggttttgctaccattgcccaagctggtcttgaactcctgggctcaagcaatccgcccacctcagcctcccaaagtgttgggattacaggcgtgagccacggcacctggcctggaaagtctttcaagggttcagttaaacatcttccaaataaaaatcatttgcaacttgcaacttgaagtccccatgtgtgactctgatgggtgatagcaagttaacccaagagctgggattcagaggtactttctgcagattccgtctccatttcaccaaggtctacaggatgaatttcttgcaaatcacatccttcttcagctggatgatccccagcatgcagaacaacgtcctagagtttgatttgctggtcccatgagagttgactatactccttaaatgtgtgggtgaccttgcgatgaatgctagattgttgaagctgccttggaacttctttaatttatggatctttccataggatgtgcttttgtctttgcatcaggatgcttcggttcctaattgttagaattgtgagtgcagactcctttgaatcacaactcgagacgatgattttctctctcttccaaagttttcctttcatatcttacgatatcatttcatctccttcgactacatatctacagtctgaatatctagaatggggtttcaggagtggtaaagctctctcaggtctgttgcctgtattcctgtgcccattttcatttgaatatacaggtttcatctggttctcagtaggtatgaaattagaaaatcatttgcttttgttttggtttttggtttttgagacagggtctcactctgttggtcaagctggagtgcagtggtaccatcatggctcactgcaacctcagcctcccagcctcaagaaatcctcctgcctcagcctcccaagtagctaggggtacaggcgcatgccaccctgcctggctcatttgaaaatatttttgtagaggtgaggtctcactatgttgcccaggctggactcaaactcctggcctcaagtgatcctcccaccttggccacccaaagtgctggtatgacaggcgtgagccactgcgcccaggccgattgtctctttttcaacacttcccatctgctctatgctttcttccaagagaccatcttgctagagaatgtgggctctggcactggggcagacaagaggcctcagatgctgactcgctcctcagatgctagattggcctgtgtctgattttttttttttttttttttttttgtattcacactgtcttatacaaaacagaacctgggaaatgtttgagaagaaaatggatttgactggttagggctattgggttctactttatcagaaaggctcttatttgaatgaatcatgacttcaggtaacttaacaattttccagtaagtcccttctcttgaaatattttcattcttctgctcccgttttgggtggggtaaggggtgcagaaggttgcaatctttcccagtatcaaagcttagatttcttcacagtacagaggcagtaaagcactgcaggcagcaggtaacatgcatatagggggttaggctaggtcaggcttttgctatccatttatacatatacgcagagggtcctactctgtagcatgaacaaactccacacggatttggtataggaaaaaatatgtaaagacaacaatatattagcaatacaactaaatatcctagagacggccacttacattctgggagtagaaagaaactttagaattattaggacaaagggccttaatgaaaagtccaaaatatgagatactcaggggagaagggttaatgtagtttcattacctttaagcttaaaatatattccaaactaagacacaaatacatagtggccgggcgcagcggctcctgactgtaatcccagcactttgggaggccgaggcgggcatttcacttgaggccaggggtttgagaccagcctggccaacatggcaaacccaatcgctacaaaaatagaaaaattagccaagcgtagtggcatgtgcctgtaatcccagctactagggaggctgaggcaggagaatcgcttgaacccgggaggcggaggttgcagtgagccgagattgcagcactgcactgcagcctgggtgacagggcaagactgtgtcttaaaaaaaaaaaaaagaggccgggcgcagtggctcacgcctgtaatcccatcactttgggaggccgagacgggcggatcacgaggtcaggagatcgagaccatcctggctaacacggtgaaaccccgtctctactaaaaatacaaaaattagccgggcatggtggcgcgcgcctgtagtcccagctacacgggaggctgaggcaggagaatggcgtgaacccgggaggcggagcttgcagtgagtcgagattgtgccactgcacttcagcctgggcgacagagcgaaactccgtctcaaaaaaaaaaaaaaaaaaaaaaagagagataaatacacagtaaagctaagaaaagataggttaatgaaaaatgtataatacaccaaacatacagaagataaactgggcaatactgcacaggtatatgaaaacctatgaatgactggattcagatggatagcatgataaaaaaaaattttatatcttaaatccttaagtcctcttagaagaattatagactttggatcagatttactttattaataagatccaaatataaagttctttttacttataatcatacacatatatatatatatatatattcaccccacacaaagaagctatttagaaattactagaaatagaaaattaataaagttttacattaaaagaaagcccagagggtacataaaggaaaaggacaactgatatcagaagagcagaacaaagggagggaacagaaaatgtcacaatcaccgtttataaggtttctgtcaataagaaaatggttaacacattttagaaagatttcaaatcatcagaaacagttaaaataaaagctggtgcttaaaagtttcagttacttcatcacctcattcactgacactgccaggtaaatgaggcatgactattgactattacaatccgtccatataaaaatattcctaacaaaaaacttcacactaaaaaaatccatatataatatttctttcaatgcagcttcttgatggttttattcagccagtaaccttcattattcaattaatacaaaccatatttcatgctgctccagttggtggcatcattttcaaatttactaaaaataacaggaacaatctactgaagaaactcatcggccaggcgcagtggctcacgtctttaatcccagcactctgggaggctgaggcgggcggatcacctaaggttgggagttcaagaccagcctgaccaacatggagaaacccagtctctactaaaaatacaaaattagccgggcgtggtggcaggtgcctgtaatcccagctactcaggaggctgaggcaggagaatcgcttgaacctgggaggcagaggttgcagtgagccgagaccgagccattgcactccagcctgggtgacaggagcgaaactccgtctcaacaacaacaacaaaaaaaaaaaaaaaaagaaagaaagaaagaaaaaagaaacccatcaactgatgttggttattaaggtaaaaaagttcaggaagaactgtttttataaagtgaagactcatcttcttgctcagatcaggctaatccaaggagatggcatccctctggccaaacatgtgccccctgtggactcccccaagacactgcctgcctgttccactctttagataaaatgactggtatacttggttattaggatgatcactgactattttgttgacagattctaatgtgtgctcagactaaaccaaaatctcatatattaaagactttcactctttaacagttaaagtgaaaaaaactcctacaggaactggacctggttatggcatttccaacgcaggggcaagcgatgaatggcagggttgaccccaccattcccctggtaatcactgctgggtgtactactaacattgcctcgcattctctgaacaaaccaataaagcaaaagtaattcccactttatggataaggaagacgtagaatgtgacttgtccaaggccacagagtaaacagatgagctcagattcaaaccttggtgaataccagcttcataaagccagtgctctgtctaccgtaatatgcaacactctaaagttagcaaaatcaagtttattatacccacgctgtaatccacatacttgcaagcaattaataaactcagagtggaaggttaaatcatctgaaaataaacatcaaaaatgtatcactaattcttggcaattcttgtatctaagcaatcaccaaaatatttaataactcaaagatgatttatcatcaaacataagaattaactccctgggaggaaagaaacaaaattctcagattttttttttttagtaacagggtatctgtttccaaaataaacatctcagacacgaaacagtgtgggaaagaatcattccctacgtggtggagatttccccactgaatcacactcagtgctaagcacccgctggctttgcacagcacataacggtgcttgaggaagatgcatctgctcttgacactgacatactcgaaggatttcctacccagtgatgagcaaaattttcctctctaccagccagcaagctcagcactccagcacatggcttataaggatacttgtattaaaaccttggcccaaaaaggacaaagctggcacaggaccacatcttgatgtaactacattccaccaactaggagcaatttgtgaatggcaaaaatgtagcacagacaataatagtataacaatgcatcatcaaaaggggaaaatatagatgattaagatggaacgaaacaagtagattctctctttgatgtctacgtgtaagtaaaaaaaagtggccatggcaatgcacttcaatcaagtcaaccatccctccacaaaactaacgctttgacactttggaaagctttcatttctcactggaactctacctctatacagatttcactctgtctaaaatgaccattgcaaagcaaaatcagcccagatccatttgggactcatgaattagtaagactatggaaaaaaacaaacaaaaacctagtattttttttttcctttgacaagttaattcattaagattaaaatgttctgggaggacgcggtggctcacgcctctaatcccagcactttgggaggccaaggtgggtggatcaccaggtcaggagatcgagaccatcctggctaacacggtgacaccccgtctctactaaaaatacaaaaaattagctgggcgtggtggtgggcacctgtagtcccagctactggggaggctgaggcaggagaatggcatgaacccaggaggcggagcttgccgtgagccaagatcgcaccactgcactccagcctgggcgacagaacaagactccgtctcaaaaaaaaaaaaagatttaaatgttttgttctcaagtctatcatttctgtattcttccaactattaacaatgcattcaaaatatagctacaatttcaaataactctgctagaacaaaatgaaactctatcaatttatcataatagaggcctagcctgttaaagtgaaaaccctgaagctaagaacacgtttcaaggtttatggttttgctactatccttgtatctgtggtagaatacaaaagcaaaaccttcctagcacaattcctggagaaagccatccattgaacaagcaaacatatcaagtgcttacaagtaaaaggtacttcttcacacaagtaccatctttgtagcctttctttctggggccctgttggcacggtgaatggccaaactaacacggcataggcaacagctcttgagtgcttcctctgacccaatgatcaaattctagatcatgtagcctgtgagtacagactacagaagcctttgagaattttgggaacaaggtcagaaagtcttcaaaaattactcggataaaaataaaattgcctgcagggaaacatacacacttcttcctacctctttggattcctttgtgtaacaagctccagccactcttgtccaccatgtccacatcagctttgtgactaaccagcgtggtggcaatactctccagtcgtcgtgagagggctagatctaatgccagatctccgttatgatccgcttcattcagcttcccagggagctacacaaacaagtttgtaaattagcgcccagtgagtagagaatacgacctattttaatttctcccaccttgacccttaaatatcatctcttatacaaatgtcaaatttaagtgctccaacactgcttactccccaaattcaactttattcacaaacttctatcaggcttcctcagggtacatgttttcagggagtacagaattaatggggaccacatagccaacataaacaatgtgggagacgattaaaggccaccaggaaaatgtggacagagtgctgtggggcacgagtgccaggcagaggctcagagagttttacggtgaacagctaatgttttcatgaaaggcagtggcgttcctatttcattcttcccagcagtttaatgtctccccatacactggacacccgggataaaacatacttcgctcccatctgtcaagagccattacatttctttcaaggtcatatggtgggcagaattatcaccccccccaaagacggacatgtcctaatccccagaacctataaacataccacgttacatggcaaaaggcactttgaggatgtgattaaggaccttgtgatggggacagtatcccagattatccaggaggcccgacctatctaaccacagagggcccgacccatctaaccacagagggcccgacccgtctaaccacagagggcccgatctatctaaccacagagggcccgatctatctaaccacagagggcccgatctatctaaccacacaagtccttcaaagtgaaaaagggaaccagaagagtaagtcagagagatgtgacatgagaagcacctgacccaccactgctggcttttaagacaaaagccgggggctatgagctaaggaatgtgtggagggctctagaaggtgggaatggccctcggctgacagccagcaagaaaatggggacctcgatcctgtaagtgcaagaatctgaattctgccaaagatccaaataagcaggaaatggattctcctcttgagtctctggaaagaagcacagcctgccgacatcctgattttgggccagtgattcctgtcctagacttccaacctacaaaactgtaaggcaatacatttgtgttgttttaagccattaagtttatggtaatttattatagcagcaaaagtaaactaacacagattttggcacctaaaagttaagaagcgtttaaaaaaaaaaaaaaactacctaaaagcatttaagaggtttttaaattgggcaatgggctaaggctggaagaattttgagaaacatgttagaaaaagctcagattgccttgaacaaactatttagtagaaatccgtacgttaaagactgtgccagtcatggctcggaaggaagtgagaagtaccacggagaaagacaagtgcattagagtttcgggaaatgaagaatggaaaaggcagctacagtacctgggaatccatttcaatcagatacaggaagaccacgtcttctctctccactttgatggctttatgtagcgggtactctgtcttggatttgatcattttgtataacaactgagcgctcatgctgctgaaatcctccttcctcaggtcgtcctgagaattcacaacacagtgaaaagcagaacagacacaaggcaatgaatccaaccaccatttagcaagcctctcaaatgcatcagtcaggcccttctttaagggcttaacctttcccaactcatttatttctccccaaaacccaatgaagtaagtacttgaacatccccattttacagaagaaaatattatggcataaagagattagataacttgctcaagttcagacagtccttaaatggctggggaaccagaaggctgacgttccgagcctcactctcctccagcattactgtgcctcccagtgaggtggcaaaacaccagccatgcatacctctaacaggaatgcgccccaagggagcctcacatgagagcagggagtcctcctcccaccccctgaaagatggcagttacaaaatcaattccaacttccacaaacaagtcactccactgagtcgcagctggtccctattattgcagatctctatatttctgcctattttaaaagaaaggttaccaatcctgtttcaatgccttaaaatccagttctttagccgccttttctgaaactctaaggcttttcccacagtgttgttgaataccaaacaattcgcagaaactaatttgcaaaaggtagcaccagccctaatattctaaaactgcaaacaacaacaacaaaatgtaaacactggccgggcgcagtggctcacgcctgtactcccagcactttgggaggccgaggtgggcggatcgatcacctgaggttgggagtttgagaccagcctgaccaacgtggagaaacccccgtctctactaaaaatacaaaattagccaggcgtggtgctgcatgccggtaatcccagctactcaggaggccaaggcaggagaatcgcttgaacctgggaggcggaggttgcagggagctgagaccgtgccattgcactccagcctgggcaacaagagcgaaactcagtctcaaaaaaaaaaaaatgtaaacactgttctttatgatgaaacaacctaagaaagggaaatctaaactgaaagatgctctccgcctgattaggagagcaagggcaagctctgaaactgtgctgctgaagctgcagggcctgctggccgtggagccacaccctactcctgcagctcagcagcagcttccacagatggagggtgaaggcaggtgatgcttccaagcctgtttctggacctcagctatcttttttgggggggcgggagacggagtctcgctctgtcacccaggctggagtgcagtggcgcgatctcagttcaccgcaacctccgcctcccgggtttacgtgattctcctgccacagtctcctgagtagctgggactacaggcacgcaccactgagcccagctaatttttgtatttttagtagagatggggtttcaccatgttggccaggctggtctcgaactcctgacctcaagtggtctgcccgcctgggcctcccaaagtgctggaattgcaggcgtgagccaccgcgcctggccagacctgagctatcttttgtcctttggctccgaaatcacagaactaccagaatttgagttgaaaagagtctcatagatcatctaatcaaactatttattcttcaattgtgtaacaagagaaaaccaggtgccagagaggtcactttccatggaactacgtccccagcggcggtctcctgactgccagctagagtgctttgttgacaccctcaacctcactcacccaatgacttgcaataatttctgcacagtagttcatcagtgtgctggcattcagctcctctgccgtctggtagaagcgaatacagttcctgacattcactagagacataacacccttctcacatctgtaagagagtattcatcatgaggagtattactggacaaataattcacaaacgaacaaaccaaagcgatcatctttgtactggctggctatgtcctattaataacactatgggataaggttaagcaaagggttatgaataaattacagttggtctcccatatttaaaaagtactagaatttcattataatatttcattgctccattctggtcagaatcaaaataacatgcaaataaactgattaagcataataccccaactgccttaacagcacacatacgacacccgctgatcacacagacaggtaattgtcgaatcaagcacaaaatggatcaacctctgtccttcaaagaaaatttaactgtgtggaacaccactttagttcccacaactgcatgatgcaaacagtgtgtcttagaaatagtttcaaatacgaggctctatgctcaataattaacacctccttaaaagctctcccggctgggtgcagtggctcacgcctgtaatcccagcgctttgggaggccgaggtgggtggatcacctgaggtcgggagttcgagaccagcctgaccaacatggaggaaccccatctctactaaaaatacaaaattagccggctgtggtggcgcatgcctgtaatccaagctactcgggaggctgaggcaggagaatcgcttgaacccaggaggcggaggttgcagtgagctgagatcgtgccattgcactccggcctgggcgacaaaggcaaaactctgtcgcaaaaaaaaaaaaaaaaaaaaaaaagctctcctataagatgaatgtgtatgatatgtgaattataactcaataaagctgtattttaaaagccccacctaggatctactgaggtcaggagctcgagaccagccttaccaacaaggtgaaaccctgtctctactaaaaatacaaaaattagccgggcatggtggcaggcgcctgtagtcccagctactcaggaggctgagacaggagaattgcttgaacccaggaggcggagattgcagtgagccgagattacgccactgcactccagcctgggcagcggagtgagactccatcaacaacaacaacaaaaaaaataaaaagaaaaaaagaaaaaagaaaaaactcacctaaaatatctataatgttttgaaaaaaacagccaaatcagccaggtgtggtggctcacacctataatcctagctctttcagaagccaaggcgggcagattgcctgagctcaggaggtcgtgaccagcctgggcaacatagcgaaaccccgtctttactacaaatacaaaaacaaattagctgggctgcctgtagtcccagatactggggaggctgaggcacaagaatcacgtgaacccgggaggcagaggttgcagtgagctgagacggtgccactgcactcaagcctgggtgacagagcaagactcgtctcaaaaaaaaaaaaaaattagaaaaaatagccaaatcatagtacaccccccacaccaaaaaaatcagatttctactgtaacaacaaaaccacagtacaccaaaatagagaaaaactggctacaatggatgtcctcataaagccgcataataataaaaacaagactctttcagaatcattaataaggaaacacggccaggtgcaaaggctcacacctgtaatcccagcactctgggaggccaaggcaggaggagtacttgtggccacgagttcaagaccagcctgggcaacacagcaagaccctgtctctaccaaaacaattgagaaattaggcaggcatggtagcatgtgcctgtagtcccagctactcaggaggctgaagtaagagcccaggagttcaaggctgcggtaagagcccaggagttcaaggctgcggtgaaccgtgatcgcaccactgtacgcctgcctagatgacagacagagactctgtctcaaaaaaaaaacaaaacaaaaacaaacaaacaaacaaacaaaaaacatcaactacatcagagaagagagagctgaaggcaggcaaataggtctctggtagcaaaagcaggaccacattgtagtctggaagatatggcattggaaagaccacacttcctctatgccagaattcctggaagccttagggagtctcccatgagaccaggcccatggggaaaaggtggccagggaacagcccttcacctccctcgcctccactgctccctccaaatcaggttcacctccaagggcagtcacagacgactagtatggtttcacgagatttcctgacatccaccattgttttccctgccagcagcctccaccaaaactcttttctaaccacaaaggcagaatgtggtggacagagcaagataaacaatgaggtaaaaaagacctgagtggagacccattacattttaggggccaaattacttgagctctctgtgcccctctctcctcctctataaaataaagatgttactctacttcagatatttgaggaatacttgtgtgtttgtcaagatggaggagaactagttacactcagcacagcttgaggtatgtagtaaatatgctcggaagtttgaggtccctctactagccgttctcgtctctaaaacctgaaattcctttactaaggaaaaatcacaaaaggaaatcacttaattttaataatccacattagtggatttcagtactgttaaccataactagctagcagataattcccaatcttaacagatgggctttaggtaacagacgtagaaaaagaccatgggaatgggtgatggcagaagaaagaaggaaggtcatgagaaagacctgggcagaatgcagaacacactttttttttttttttttttgagacggagtctacctttgtcgccaggctggagtgcagtgacatgatcttggctcactgcaacctccgcctcccaggttcaagcgattctcctgcctcagcctccagaatagctgggattacaggcatgtgccgccacacccagctaatttttgtatttttttttttagtagagacggggtttccccatgttagccaggatggtctcgatcttctgacctcatgacccgcccgcctcagcctcccaaagtgctgggattacaggcgtgagccaccgcaccccacctcacaacacactttcaaaacatcacgaaggagaggctaggagcaagaataaaatcttggagtcatttctctgtttagcagtaaatgcaggcacctgctttacactaagatctgtcaaagctttgggttttttttgagacagagtgtgctctgtcgcccaggctggagtgcagtggcatgatctcggctcactgcaacctccgcctcctgggttcaagtgattctcctgcctcagcctccagagtagctgggattataggcgcccgccaccacgaccggctaatttttgtattattagtagggacggggtttcaccatggcagactgggtgctttgtttttaattaacattactgacttggtgtaaggaagcatctctcccagggcactttaaaaatcatgttgttacaatatctaagtaagttacattagtaagttaagttacaataataaacaagaatgtaagttacatacaacagcattatatttatttcttttttttttttttttccaagatgaagtcttactttgtcgcccaggctggagtgcagtggtacgatctcggctcactgcaacctccgcctcccaggttcatgcgattctcctgtctcctgcctctgcctcccgtgtagctgggactaaaagcgcctgccaccacgcccagctaattttttgtatttttagtagagatgaggtttcaccatgttagccaggatggtctcgatctcctgacttcgggatccacccacctcggcctcccaaagtgctgggattacaggtgtgagccatcacacccagtcaacagcattatatttctaagcctcagttttctgtaccattggtttctccaaacctgtagcacaccacagcaatgtctgacaaagtcactctaacctcagccatgaaatcagagcattccagcagaaaaaaacctcttttcagatagctttcagaagcttttaccatttttacaactaatattcaatctgccttcctaacatcctaacaccaggcagcctaatacacagtatgatctcaggaagtaataactcacatttgcagagcactttacaaagcacctttacagcatttgctgagaacctgaaaattccactctcctccttttcactgtcaaatgacattgcaccaagggactcaaatatgtttcacgaaagcagatcttttattaaagctggcagacatttcactgtcaccaattctaggatctccagagtgccatttgccatttggatagattataaatagtaactgacatgatttacgcaaccaaggaacacgtaatcttatttagaaattaagattctcggttcctatattctctttgaaaatagcaagacagacagactttcacccgaagggaattttttaattattatttttaactttagagtacagaaaggacacagagatacaaaaacgataaacctaactttttttttttttttttttgagatggactttcactcatattgcccaggctggagcaacaaggctcaatccaggctcaccacaacctccacctcccaggttcaagcgattctcctgcctcagcctcctgagtagctgggattacaggtgcccgccaccacgcctggctaatttttttgtatttttagtagagactgggtttcaccatgttggtgacttttaaagtataacatcaagcatatatttaaacgtcccacaaactgctgtatagttttcatatcactcttgagtggatgtgggaaaaaaaaattattgaaaagaaaaatgacagaaggtaaacaatgatttagttacaaatgacttttttctttatatcattctgtatcctccaaatatcatacaccgaacatgtattatacttttgtaaggagaaaaagattaactgtctttttttagtatacattaattatctctttaaaaagattagccaggcacggtaggtcacgcctgtaatcccagcactttgggaggctgaggcgggcggatcacctgaggctaggagtttgagactaacctggccaacatggcaaaaccccgtctctactaaaaatacaaaaattagctgggcgtggtggcagtcgtctgtaatcccagctactcaggaggctgaggcaggagaatcgcttgaatcgggaggcggaggttgcagtgagccaagactgtgccattgcactccagccagggtgacacagtgaggctgtcttctaaaaaaaaaaaaaaaaaattaagagtattttcttcagtgtgccctccgtggtagaaaaaaaaagaaaagattttcctgatgcttactataaaaacttccttttcatcaaatcagtgctagcattccaaaaccggcgagatccccacattacaaaaagagcaacggctgcttcacactgaaccgcacccgtcgctagcaccctttcattatctcaagcatgtaattccttccaaggacagcagggggcactctgtgaccctttaaaagccaacccttgactccactcccggtgtcttccactccagctcttaagaaagccatgacagataataactcgatactcatatctaacaatacaaaattaagcatctggtaatgttgacagttatgaagcctactcggtcaacaaacaacaaacagtttaattaaagaatccattacacagattacaattatctcaactactccaaccccaagacatttttacaaaagcaatttaatttacataagcaagtctgacaaggtcaacaggagaaagctcaggaagtctggaaaacatataaagacataaatcatactcaatctaattaaaatcagtctgatttcactatcaccaaaactcctcaccaaaacaaacaaacaaacaaatgaaagaaacagttaactgaatgtcctcaataatcaaatcagctttgctaatagcctaatgctgtatgcacctatagactgtggacctgcttttgttttttatttataggatttagatattaaaatgcactcaaacccacatcaataacagacaggagtaagccgtccactgatttcatgtggggcacagtgagccctcctgggaaaacaccagcccatgacgaaaacagcaagcagctctaggcagcaaagtctctctagggaaaacacagcaataggtggagtgcctcctgatgactgaaaccatcccttcactcacccaggagaaaagccattactttatgcacccaagggaatacaaagatcactaaatgctgtaaaaagccactccatcagcaagctgattaccaagagccacagctccaatagaaagacgctcccggacatctcgtctgacattatttagtgaacgttttgttttctgttgttctaaaatgccaacttgggagagcaacagagaaaatgtaatataaaaacacagcatgctatctccttgacaacctaaaatgcagtaacttaaatgaagtgagatctctggaacactggctatgacacttatttggacaatattttcacatattcatttaggcactcattgtttccaacaaagagactatgactaaggatttcattcaacttgatatatcagaaaatagagtaaaatgtcaagggaaacagaaagggaaggaaagctgaaagtttggacattggattatattatttcatatttaatttttcagtttatacgattatgtaatttcaggtaacagaccagtgaaagaaaagagaatagcaaaagctttagcaaaatttagctacaagataacacaaagcaagggaggtaacatctgtccccagcatcgcctttaaaggaacaccttgccaagttatttacattagcagaagaagctgttttcccagagctcggcataattaaagctcagccaccaccatctgaggtgcttgaatatatctgctgtgacttgcctctccctgaggagctgtagctgaaaccgatttgctagtttcatcagttcagtcaggaacacatcatcctctctgaactccagctcatctgtatagatccagcgaagcattgtcatcgtcacctcaggattagcatctggttaaagaaagagagaacaactgaaaaagcatagaatgacatgcttagactttctcaagggatccctaaaatttgaggctaataaagtaaatgacagtatacccaacttaaaggaatattacacagtcattaaaaatggggactcggccgggtgcagtggctcacgcctgtaatcccagcactttgggaggctgaggcgggcagatcacgaagtcaggagttcgagaccagcctgaccaacatgctgaaaccccatgtctactaaaaatacaaaaaaaattagccgggcctggtggcgtgcacctgtaatcccagctactcgggctgaggcaggagaatcgcttgaacccgggagacggaggttgcagtgagcagagattgagccactgcactccagcctgggtgacagagggagactccgtctcaaaaaaaaggtgactcagcagtctgggcaacatctgactaaactttcgcagtgggcagtgagtgaggaaataaacctactaaagatatgtcgaataaattggggaaaatatttgaaacatatgacaaagaattaacattattttttttttctttttgagacagggtctcactacgtcacccaggctggaatgcagtggcacaatcatgcctcactgaagcctcgaactccctgggctcaagtggtccttacacctcagcctcccgagtagctgggaccgcaggtgcatgctagcataccaggttaatttttgtattttttgcagagacggtttcaccatgttgcccaggctggtctcgaaatcctgggctcaaagaatccaactgcctcggcctcctaaagcattaggattacaggcgtgagccgcttcacccagcctgagttaacattctttatgataaaaagaccttacaaataaaaataaaaagacggatacccaatggaaaaatgggcaatggatacaaataggtaattcacaaagataaataatggctagtaaaccttactgataaccaaatacaaactgaaatcagagtacatttttttatctctcagactagcaaagattttttaaagaacataacctttcacacagcaactacatatgtagacattatccaaagaaaataactggacagataaagaaaaatgtactaagatgctcagcacaatattattaatgaagaactagaacaaaaatcgtaagagtccaacaatggagaactaattaaataaattacaatatacatacacactgaacaaatgcaatgaaaactagatagatatatattcaacataagatatttactacataggctttttgaaaagtaggctaaaaatacttgtataagatctcattggctgggtacagtggctcacgcctgtaatctcaatgctttgggaggccaaggtgggcggatggcttgagcccaggaattcaagaccagtgtgagcaacatggtgaaaccctctgtctttacaaaaattcaaaaattacaccaaaatctcagaaatcaccactaaagaacttagccatgtaaccaaacactgcctgttccccaaaaactacagaagaaaaaaattaaacaaaataaaaccaaaaaatataaaaattagctgggcacatgccattagtggcggcatgtgtctgtagtcccagctactcaaggggccaatgtgggaagagaaattgagccgggaggttgaggcagtactgagccgtgactgcaccactgcactccagcatgggtggcagagcaagaccctgtctcaaaaagaaaaagaaaaaaaaataggtcttgctttttgttaagatacacctgtgtgtgtatgcatgcatacatatatatataatacctacacacactacacactacacacatagagaggcagacacacatttttctgtgtctgtctctcaagagattggaaggatatatactaaaatatcaacccaggtggaatttataactaatttttcttttagcttaattttacttttagctttatttttatttaaggaacatgcattatttgtgcaatctttttaagttaaaataaagactgtacagcaacttggggaaatgcttgggatgagaatcatagtataaaatatctaaactattatttcaaccagagttaactcttgattagtcagaataagaagagtgatggtcagaggaatacttaaaatcatggtcaacgcaagtaattctcacggtgttgtcctgggccaggagattcagcctcatctgataactgattggaaatctgattctctgtcctaccccagacctgctgaatgagaaaccagagatggggcccagcacatgtcctaacaagtcctctatgtgattctgatgctcactaaggtttcagaaaccgtacttgattcttgattacctaggaaaggtgcaacaaggaccaggaacaccttattaacttcataattaggaattggctcattagctctgattactctcctttccaactagagtgggaaggagcagcttgaagggggcaatgtcaagtgagtggacttgaagaccccgacttacctgcaaccaggttaattcaccatctcctaaaacaaccagatattaaaagtaaaaaaaaaagaaaaagaaaaagaaaaagtgaaatacactaaaatgataatattgtagttactatgttaaagtttttcttttttctctcactgaataatatagtaatagcaccttttcttttttttgagacagagttttgctcttgtcacccaggctggagtgcagtggcgcgatctgagctcactgcaacctctgcctcccgggttcaagagattctcctgcctcagactcccaacgtagctgggattacatgtgcctgctgccatgcccagctaatttttttgtatttttagttgagatggggtttcaccatgttagccagactggtcttgaactcctaacctcaggtgatccacctgcttcggcctcccaaagtgctgggattacaggcgtgagccaccctgcccggccagtagtagcacttttaaaatgttttaaaagagaaaacattttaacaccagacagaaaactaattagatttatttaaacaacctaggtgcttcagctaagctgtctaagatcaccatagtagatcttggaagtaggccaaatttctaagcaggctttgtaaattgggttcaatacctcagtagtcatcgtaatgaacaacaaaaaaaatgtaggccatgtgatttgtccacagcaaccaaaaatcccaaaacacatcctactagactcacatggcctgatcttgaagacagctcgttcctatctgctgagagaatccccagcaccaacaccctcaaacaccttccctacagtagcagtttcttaaatactatttgcaaacttgcccggttaatcttgacctgtacaagtaataaacaaaaacctagattatcaaaaaacttttttaaactactttcagtagggatttcctgggagggcttgatatttcaaacaaaatgaggttcaagtgatttacaagctttcccactcctgccgtgactcttcccctcatctacaaaatacactgagaataaattcactttgtgactcagacgaagcagccagtggtataagggtaggcagagaacaaggatcaggaaggacagtgtgtgctgcaactgggtacttgtgggtaaatcgtccacactgtctgcttccaatctacttaagcaagtggttgtaaaagtcagatgactgcataaagcacgagttctctctaaaaggagtagactcagaagagaaagcagttggcctccgagtcctgcgtgagggaggtaatcatctctcagaaggccctgcatgcaagccagaaaaatctctgacttcaaggatgaaaagtaaaataacactgaaacttctgacttcgtttcactgcaggccaggatgcatgtaaatacactttggagactttaggattttctatgtggcctagttttttgttttggtttgaattttaaataaatgttttccaagacatctgaaatggatgggaataaactgatctgtatgcaattaaccattaaatgaaacatactgagtaaactgactttgttttttactttatttatttagggacagagccactgttgcccaggctggagtacaatggtgcaatcacagcttactacagcctcgacctcccaggctcaatcaattctcccacctgagcctgccgagtaaacgggactatagacacataccactgtgcctggctaatttttgcatttttaggagagaaagagtttcgtcatgttgcccaggctggccttgaactcttggccttaagcaattctcctgccttggcctcccaaagtgctggtattacaggcataaaccacagcacctggctgactttgttttttaaatcctctatttttaatctgtaaaaagctgagaaaggtgtcttgaatctcctattatgactctggtttaattaaattctctgagtttccaactgtttttttctttttatttgggtcagagtctcactctgttacccaggctgcagtgcagtggcacattctcggctcactgcaacctccatctcccaattcaagcgattctcctgcctcagactcccaagtagctgagactacaggagtgcgtcatcacacccagctaatttttgtatttttgtagagatgaggtttcgccatgttggtcaggctggtctggaactcctgacctcaggtgatctgcccactgtggcctcccaaagtgctgggattacaggtgtgagccaccatgcccagccctattgttttctcaatctacttcacataaaattttttgcttcccctattccggacgatgccgccaaggaggtggcggcgcgctctggaggtctgaagccgctgctggctgccacaggctagcggcttgatgaattgggcagccgccctaggctcagggctgtgagcggctggggccaggggtaggcggcggtgcggcgggcggccaggcgccgggaggcgtggctggggtgccccgcggccagaaggccccgccgccgccgctgctgctacccctgctgcccgcgcctggcgccgccgcccccgccgccccgcggaccccggagctgcagtcggcggccgcggggcccagcgtgagcctctacctgagtgaggatgaggtgcaccggctgatcggtcttgatgcagaactttattatgtgacaaatgaccttattattcactacgctctgtcctttaatctgttagtacccagtgagacaaatttcctgcacttcacctggcattcgaagtccaaggttgaatgtaagctgggattccaagcggacaatgttttggcaatggacctgccccagggcaacatttctgttcagggagaagttctacgcactttatcagtatttcgggtagagctttcctgtactggcaaagtagattctgaagttatgatactaatgcagctcaacttgacagtcaattcttcaaagaattttaccgtcttaaattttaaaccaaggaaaatgtgcaccaaaaatggccctgacacgcagctccaaccacttctacgcgtgttttatattagggtagggtttcttgtgcagtaatatttctcgtagcaataatattagctgttttgcaccttcatagtatgaaaagggttgaactggatgacagcattagtgccagcaggagttcccaagggttgtctcagccatccacccagacgactcagtatccgagagctgacacacccaacaatccaactcctatcaccagctcctcaggttatcctaccttgcggatagagaagaacgacttgagaagtgtcactcttttggaggccaaagccaaggtgaaggatatagcaatatccagggacaggataactctaataaaagatgtactccaagaaggtactcttgggcatattttccatgggattttaatagataaaaaagatccaaataaagaaaaacaagcattggtcgaaacaaagatcaagcttctgaaattcaggtgacaatgatgctcactgaaagtcgtaagctgcaaagtcttcatcacagaaatcttcttcctattactcatgggtgtatacgagaaaagcccatggtgacactgccttacatgaactgagggaatcttcacttgtttttacggcagtgcaagttagtagaggccaataatccacaggcaatttctcaacaagacctggtacacatggctattcagattgcctgtggaatgagctacctggccagaacggaagtcatccacaaagacctggctgctaggaactgtatcactgatgacacacttcaagttaagatcacagacaatgccgtctcatggactatcactgtctgggggacaatgaaaacaggccagtttgttggatggctcttgaaagtctggttaataacgagttttctagcactagtgatgtgtggggcctttggagtgatgctgtgggaactcatgactctgggccagacgccctacatggacactgaccccttcgagatggccgcatacctgaaagatggttaccgaatagcccagccaatcaactgtcctgatgaaccatttgctgtgatggcctgttgctgggccttagatccgggggagaggcccaagtttcagcagctggtacagtgtctcacagtttcatgcaggcctgggggcctacgtctgactcttctctcgcaatcccacagcatcaggagaaaggtgcctgtcatggatgctttgtatctaacaccacgccaacagaagcacatttgtcttccagaacactgtgcctcagcaatgctttagaatctgaactttttaagacagacttaataatgtggcatattttctagatatcacttttattaggttgaactgaaagggtttttgtaaattttttggccaaaattttttaaaacatagttaccttggactagaggtacattgttacaaaatgaacagtttttaaaattgttcagacacagatatttggaagtagctatcttagtgccaactgctttttattttttttacttcatcaaggtgatgtaagtgactcacctttgaagttttttttttttttttttttttttttttgagacggagtctcgctgtcgcccaggctggagtgcagtggcgcgatctcggctcactgcaggctctgcccccggggttcacgccattctcccgcctcagcctcctgagaagctgggactacaggtgcgcaccaccacgcccgactaattttttgtatttttagtagagacggggtttcactgcgttagccaggatggtgaagtttttttaatgttattttttatcactactcttggaaatggcctgtcttcaagatgcaatacttttcttaggaaaggaaaaacagcataaaaagatacctggtttgtcttgtacaagaaaaggcaatatgagaggaagaaaatttaaagaaaagctagaggaaaaaaaattttttttaatacttattagaagcaaactgcccttgcatggaaaactgtttgtttgtttttttttagtgaaaaggaattctgctttcgtgtttttgggaaagcaggaactgagttcattgcatctttaatttggtggaaattagcttttctgtgaaccagaagtggtttgaggcagatctgtagtaaataatggtgattttatttatttttactctctggaaaaggagacaatacaattccagaaagtggactcatatttctaaggttaagattcccgtttattgcacctagaatagtgctatgcacagagtgggtgcttgagttgtcgttttttttttttttttaaataaactggtaaattttgtgcttatcttcaaggctggcttaagtataaacttgtttttttaaacacttgaaaaattaaaggatttgttttatatttaaaaaaaaaaactttttaggctgggtgtggtggctcacacctgtaatcccagaactctgggaggccgaggcaggcggatcacttgaggtcaggagtttgaaaccagcctggccaattatggcaaaaccccctctctactaaaattacaaaaagtagccgagcgtagtggtgcatgcctgtaatcccagctactcgggaggctgaggtaggagaatctcttgaagccgggaggcagaggttgcagtgacccaagatcacatcagtgcactctagcctgggggacagagcgagattctgtctcaaaaagaaaagtttttgcttcatagaattaaaaaatcttggtagacagtatcatttttatcaataaataacatcctctttagtcaatttaaggatgtatccttaaatataacctcctggaaataaaattaaacctcaaaccatatttctaaataatctctgggtcaaaatgaaataaaaggacagaggttctagttctgttatggcagtggaacaacccatcccattttaactgattatagctaaaaattctggacagagtacaaaacaacaacgacctaaagatttggaaaagtcaacaaaagcagctgaactgagagggaggcgaaacttgaagcagcaactgcactggatgagtttccccgttttgttcctctcctatggcttcggtgtgtgtgtatatatatatttatataatttttttttgagacagggtctcactgtcacccaaggtggactgcagtggcgtgatctcagttcactgcaacctctgccttgcaggctaagtgatcctcccacctcaaccttctaagtaactgggaccacaggtgagtgccaccacacctggctaatttttttgcatttttggaagagatggggttttgccatgttgcccaggctggtctcaaactcctaggctcaagggatccgcttgcctcagccactccaagtgtgggattacaggcgtgagccactgaacttggcaaaaattattttaaaatgataaaagcaacaattccttaggaagtcataattataaatgtaaatgtacataatagaggctaaaaattatatgcagaaaaactgacaaaaattaaaaggagaactagacaattctaaaattatagatgttaccactctcctttaaggaattgatagaactaggctatgcatagtggatatcgcctgtgaatccagagctttgggaggccgaggtgggaagataatttgaggctaagagtttgagaccagccagggcaacacagtgagaccctgtctctacaaaaaaacattttttttaattagtcaagtgtggtggcatgcgcttatagtcccagctactaaaaaattcacaggacgcagctagaaggaaattcaaagctttaaatacttgtattagaaaagatctaaaataaattatctcaggttccacaactttgagaaactagggagaaaaaaggagaacgggagagcaaagtaatccaaagaaagaaaaaaaggacagaaatcaataaaatatagctgggcgtggtggcgcatgcctgcaatcccagctactcaggaggctgaggctgcagagttgcttgaacctgggaggcagaggttgcagtgagctgagatagcgccactgcactccagcctgggcgacacaacgagactccatctcaaaaaaaaaaaaaaagaaatcaataaaatagaaaacaaccaacagagaaaattaacaaagccaaagctcattctttgagaagataataaaaatgccaaacttctatagacttatcaagaaaaaaagagtgagaacataaatcaccaatacccaagaatgaaaaaggagttattgctacagacattaaaaggagaaaactacaaacaaattcatagtaacaaattcaacaacttaaatagacatatttctgaaaaacaaaacttcccaaacctgacacagaagaaacaaatctgaatagacctatatctatacaaaatacatattttaaaaatttgttttcaaaaagcttcccaaaaagcaaattctggacttagattacttcagtggtgaattctatcaaacattcaagaaataagcaataacatcaatcttagaaaacattttcagaaaacagacaatgaaggatcatataaggcctatataaccctaatagtaaaatctgatagagacattaaaaaaaattacataccaatatccctcatgattactgttgtaaaatttttaacaaaatattggcaaataggatccaacaacatacataaaaaagggtaatatataatgaccaaacaggtttttacagcaggaatgcaatcttagtttaacatctgtaattcatcaaaaattatataatcatttctatagatgtcaaagaaagtgtttggcaaaattcaaaaaccaattcaggtaacttatctagaaaaccaggaatactcaaattgataaagcgtatccaagaaaaacctacaactaatctatacaaaatgataaaagatctcattgtttctccctgagatcaagaacaaaggatgcttgctttcagacaaatgacttgtatctaaattatatacagaactgttaatactcaatactcaaaactcaatacaatgccacattttgaaaaggccaaagatgtgaatactttataagaaaatataaaattgtcaataacacacaaagaaggttcagcattattatcaggggaatgcaaaataaaactgccatgcactctgtatccattagaatggctaaaattgtaaacaaaaaccaaaacaacctgcctatatcaagcgttagtcaggatgtgaagcacctggagctctcatatccacggctaatgggaatgtaaaatggtacatccattttgcaagacagtttggtagtttcttaacattaaacagtccctcctagatatttactcaagagatataaaaacatgtctacacaaaggccttacacaactgaatacaggtaattttcttgctaataaaacccagaaagaacacaaatgtccatcaacaggtaaatgcaaaaaaaaagtgtggtattttcatacaatggaatactattcaataacaaggaatgaataattaaaacacaaagcaacatactaaggtgtggggtgaatgtcaaaatctatatgctaaaagaagtgaaagaagccagacaaaagggactctatgctctatgattgcacttctataaaagcctagaaactgcaaactaatctataatgactgaaagcagatcagcatttagctgcagaagtggatggcaaaagggatggattgcaaagagacatgaggaaagctttaaggatggaaatgttttttgttagttttttttttttttcttgagacagagtctcactctgtcgtccagacgggagtgcaatgacgcgatctcggctcactgcaacctctgcctcccaggttcaagcaatctcctacctcagcctcccaagtagctgagattataggcatgtgccaccatgctcggctaattttttgtatttttagtagagatggggtttcgccatgttagctaggctggtctcaaactcctgacctcaagtgatccacccaacttggcctcccaaagtgctggaattacaggcgtgagccaccacacccagcaaggatagaaatgtttatgttgattgtggcagtggcttcacaggtgtattcgtatgtcaaaacttatccaattgcacacttttaatgtgggcagtttactgtacttccattacacctcaatttggaggaaaaagaaaccaaactgacaggcagcacggcactgtggttaatggcacgaattctgcagccaaactacctagggttcaaatcccggctccaatccttgctaactgtgtggagttaatacataataaagcactcaaaacaccaccaccacatagtaactgctatgtaaaaacttgctattattacaatagactatttagaaattgatcacaatgaaaacagtacctaccaaaatatttgcaatgtagtcagattcatactataaaaaaaagtcatagtcttaaccttattagaaaatgaggccaggcatggtggctcacacctgtgatcccagcactttggggggccgcagtgggtggatcacctgaggtcaggagttcaagaccggcatggccaacgtggcaaaaccccatctctactaaaaatacaaaaattagccaggcgtggtggcgggcacctgtaatcccagctactcaggaggctgaagcaggagaatcacttgagcccaggaggtggaggttgcagtgagctgagatcacaccactgcactccagcctgggtgacagagtgaggctctgtctcaaaaaaaaaaaagaaaatgagataaaagatagtaattcaactcaaaaagaaaaaataattcaaaggaatttcaaagaaagatttaatacagataaaaagaaattattgaattggctaaatataaataaaaattaaaagaacaatgaacctaaaccaaatctgcaataagccaacacaaacacaaacttaacataaccaaagattggtgagaaaaacccaaaagcagtatgaggattaagtaaagaatataaccgcagataaaatagattattttgagctctgagagaatctttgggcatgggactcagctgctggcaggaggccacaaggctgtttgagtgtcctcatgacatggccgctaacgttcccccaaaatgagcaatccaaaagagagagctaggaagaagccacagtgccttcgatgaagccatctctcaagtcacatgctgccacttctaccacactccattcattagaggtgaatcagcctatactgaagaggagaatttgaatccacctttgcagggagaaatagcaaagaatttgtgagcatattcttttttactcctttttgtgagcatattctaaacttcccgtggatgtcatcgaaggaacacagtatgatttaatactgaaactgaacagccttaacctagtagttcacacagtagccaacagatgttgaatattgctgtgcttctcttaaaaatttaaatagcacacagctccccgagtacacagtttgggaaactatgccctttccactgcagagtgcaagctttccagatggtgcttcaggggatagctttcccaaccagagtgaaaaggaataaaggaggatgttttctgctgtttggaatggcttgacactatccaggacacattccaggagagctgaatgactcataccctgagcccttatgccaaggaactgtaagatctttgcttgagaaagtatgcaacaaactctagcttcaaaacagccattctaatccattggaacctctcatcgtgtcagctgctactggtaaagtgctacagagaggccataaacagatcattttgctagaagcaaattgctttacttcaccaagaagtaaatataatactttccttgtggactcagatttgttatgctttgctgagctaacagtcatattctttctcttcccacttggtcaatcagtatctttataaacttttatcttttattcttttttattagggtttaacagacaaaaattatatagagttaatgtatgacatgttttgatatatgtatgcactatgaaatggttataagctaattaacatatcacttcatatatttaaagataccttagtaagaaataaaaaagcaaatttctactttgtttacattttcagatactttcatactttgagaaaagctgcagagcatccccatatgccctttactcatcttcccctattattaatacagcttatataaccatagtacaatgatcaaaattaggtaactacgtaatacatacaataccaataccattaactaattataggccctattttgccaattttaccagtaataccctttttatggccagaatccaactgaggattctacactgcattcagtgttagtctcacccaatctgtaatacttcctaaaccattcttgtttttcataaccttgacatgtttgagaaacactctggctgattattttgagaaatgtccctcaatttgggtctgatgttttctcatgagtagattgaggttatgcattaatggcaaaaatcctatacaagagccaggcagagtggctcatgcctgaaattccaacactttgggtagccaaggcaggaggatcatctgagcccaggagtttgagaccagccttggcaacacagcaagagcccatctctattaaacaattagccagggatggtggtgaacacctgtactcccagctacttgagaggctgaggtgggaggatctcttgagcccaggagttcaaggcttcagtgagccgcgatagtgtcactgcattccagcctgggcgacacagtgagaccctatctcaaaaacaaaaaaagaatcctacagaagtgattgtgccttcatcagtggatcatatcaggtacaaacatttcacttttttgaacaaggtatgattcatatatccaaacacctttaaagtgtatataatgcctgttgtatttcatcaacatatgctaaaattctcataatcaaggctgtgtgcagtgcctcacacctgtaatcccaacaggcctttgggagaccaaggcaggaggattccttgagtccaggagttcaagaccagcctgggcaacatggcaaaatctcatgtctataaaaaatgagacaggcatggtagcacacacctgtggtcccagatactcaggaggctgaggtgggaggatcacctgaggccaggaggtcaaggctgcagtgagccgtgattgcaccatggcactctagcctgggtgacagagtgaaatcctgtttaaaaaaaaaaaaaaaagaaagaaagaaatatcaattagacaagaacatcaaaaagaaaaatgtggagtttttcttacattctaagatgtaagtttatgcaagcaagaatttaattttgtacactttgtatccctaacaccttgaaaagcgcttaccactcaatgttttttatatgaatggattaatgttgaaaaaacaaaacaccaataaattcattaaatgattttatcaagcctgttggtgtggaaaacatttgagcctttaaaatacagcttttatgctatttatacacctgtttacaagaacctatttccaatcttcctcaaattgctgccatgaagtgtcagtgcttccaggtatcacataacacacaggcttcccaggcagtctcagcaactgcaagcccaggtttaggcaatgagcaggactgctgggcaaagcacacaattcaacaggaacaggcccacacatgccactaccaccttggacctctcccccataacacatttcaaagatacatttcattaaaatgtcataaaaagtaaaaatgccacatgttctcctatctgctatcttcacaggtgcttgatctgtgaaagccacaaaaaccatttactttgaagcggatcactcctgaaagcaaaccttatagtagaatcaaaacacgcttattatttacaactggaggagagtctagagacatttaaagacattaatattctattttcctgaactcgagaaaacttcctgactcacagtgatgcaatcttgtggccagacagcactgaattaaggccagacagcactgaattaaagctctaaacgtttggatgtactaaaaaatttcagtgtaaagcaaaattttttaattcaatgttaaaattggctttttattccttgatgtaattttctgtgttgtgtcgttttgtttcagagagcagcgatgtttcgtttttgccactctcattcattttggtggcagtcgatatttcacaattaaaataaaactgaggaacattaacactgtctgagtgacctacgacagtatcccagaagtcagataatgaagaaaaaaaaaaaagtaggaatatttcacagctcagctgcctaactgctttctagaactgtcatacctatttgtatcgtcactggcaaatgtacaagaataccaccttcatgagcctcacagctactaggatcaccaatgtttgattatatagatttcaaaagatggtagcttattcttaacttttttctaacaaagtcgaatattttccatatatttattaccttctagtcttcataaacattctgttcatataatcaagatcctatcacacattttgtgaagaacactacatgatcttataaggtcttcataattctgttatatatgaggtcaaagatacatggtttcaaaacactatgctttaaaaaaaaaaaaagctatccctcgagatttcgatcacgtggactggtaccctcccagtaaaaaactatttcccaggcaaatgtttttagttactggcatgcaggcatctgcacatgtgtaggtgtgtatgtgcatttgtatctacaacttttagttatggacctcaagttaaatcctagaaattatcataaagagacagagttcgctcacagttgggaaacactgatatatgttccccttaatccatgagataaatgcctacttagcctttacaacactactcaggtattagccacctctgaaaccttcctttatcaccccaacttagtctgttctcaaccttatatataagctaactacatttctgtatttacagccctggtctgaaatgatttgtgaatggcctgtttcctccagcagagtacgggctccgtatggcagggactgtgttataatcatctcagtgttcctggcactgcgcatggaaaacagtaccttctcaactgacaaaccttctgaacaaagatataattcacacaatcacttcggcaagtccagtcataagcagcataactatgtttggtcaacaacagactgcagatacgatgatggtcccgtaaaattataatattgtacttttactgaacttttctatgtttagatatacagatacttaccactgtgttactgctgcctatggcattcagcacagtaacatgctgtacatgctgtacagttacacagaacatgctgtacagggttgtagcctagaagcaacatactataccatatagcctaggtgtgtagtaggctataccatgtagatttgtgtaactatactctatgatgctcccacaacaaaaccacgtaatgacacattctcagaacacatccctgttattctcctcaccatataattctgatgaatattaatactagaattaaattaaaattttgctctttgcccctttttttccaatagcagtcaggcaagtactaaatgaaaatgcaaccttcaggtcaacttttgaaaatgactgttttcaagtctacttgccaccctatttgcttcaatcctacacaaaaaaatgtgacataaaacaagtaacattaaataggccaatgtagctattaattttttctttttttttttttgagacagggtcttgttctgttgcccaggctggaatgcagtgaatgcagtggtgacatcatagctcactgtggcctcaaactcttggctcaagaaatccatccacctcagattcccaacaagctgggactacaagcacatgccatcctgtccagctaattttttctttaatttgctgcagagacagggtcttcccaggctagtcttgaattccctgggctcaagtgatcctcccaccttggcctctcaaagtgctaggattacaggcatgagccaccatacccggccttaaaattctttttttaaaaacaaattgtattgtgtatatttaagctatacgacacaatgctgtgggatacatatatagtaaaatgagcactatggtgaagcaaattaacatatccaccatctcacatagtaacccaaacctattaaaattctgaaggctaatggtcatcttttgatgttaaagaaagaatattgttattcttcagagtaactattctgagttcagttctgataaactagaaaaagtactttggccagacacggtggctcacacctgtaatcccagcactttgggaggctgaggtgggtggaccacctaaggtcaggagataaagaccagtctggccaacatggtaaaaccctgtctctactaaaaatacaaaaattagctgggtgtggtggtgggtgcctgtaatcccagctactcgggaggctgaggcacgagaatcacttgaacctgggaggtggaggttgcagagagccgagatcactattgcactccagcctgggtaacagagtgagactctgtctcaaaaaaaaaaaaaaagaaaaaaaaagtcctttggcatctagcatgaagttttaagcaatttgacagcaggactttttattagacttgagggaaaatttttttctggacatgaatccttatttacagcatattttttcatgaaatgagtgtacggaaaaacacttacattttataaatcataaggacattgcagatactcaaatatttacgatttgttagccaggtattacctcctaaataggtaggtacacaaagtacctaaaagtacaacctgctgattcattaattatttaactagttcatggttgccatcaattgcttaattattttactttcattaaatcacaaatatttcaaaatgagacaccacaaccttctgccaagagcccttccgctagcagttttgtgtccctgatcactcaaaggctcacctgacaggtccaactctttagtggaagacaagttagccagactccagctgtcactgcgggctgccaggacaaacttgtgagcactgatgtgcctgtccccaacctttatcttcagatcgctgatgaagaaaaagatccacatatattagaaaaatgtcatcataactaggtatagctaggattcacagctgataaacacatgagtattcatcaacatacatctgcaaaagaaaaaattacagcgaagaattattcctatatgctagcactgaattctggtgagtcatctttatagtatgttgctagaaatgttttctattgataaattctggctttaattcacatggcatgcgctgctttcaaatacatcttctcatgggattcttacggtggtgaacctacaagttaagtaggatgattaatattcacataaaaagtagaggatattttatatagactaaaacaagctaaaccatcagggagagaaagacagaaaggttaaagatggtgatgacaactctgagactacagtgctactatgctccacagtaacgctcaagcaaggttaaacagaaaaaccgtgaacaaactaacaagcagtcatgaacatgaaacccagtatctggactcctgttctcactagaaacattcagtcctaatattgaccattttttactcaactacttataaaaaatggggtgaggaaaaagctttcttttcaaaacatgtttccataattatgacatgccattatatgaaaagatcttcccaaatagatatttatgtttaactctgaaatgtcaaatactactggaggagagcatctgggcagttaacaaaaacgtcaagatgacccactaggctgacacgaacacatgccgtatggctatgctggcaggaatccaaagtcactgtcatcatcctgcttgtagttatatgttttattttcatattcaactttaaaattatttactaggttggaaagtctttggaaactaaatacacaaaaaccactatatggaaaaaaagaaaaagaaaaaaaaataccattacatgaattaacccatccatttaaaaggaaacccaagccaggcgtgggggctcacacctgaaatctcagcactttgggaggccgaggtgggcagatcacgaggttgagattgagaccatcctggctaacatagtgaaaccccgtctctactaaaaatacaaaaattagccaagcatggtagcaggcacctgtaatcccagttggtcaggaggctgaggcaagagaatcgcttgaacccaggaggcagaggttgcagtgagccgagatcgcgctactgcactccagcctgggcaacagagcaacactctgtctcaaaaaaaaaagaggaaacccaaacagaatattgtttgtatataatgcttgacagagacacattctacgctacaagagtattgtctagaatacacttaatcatcatttgaaagtatcggcaattctagttctatcaaagaccaagctataaccaatggatattagatcacaagattaagagagtatttattatttcaaattattacaaactgctgttaacacagtagaacattattaatggtcaaagaagaaacagaatactctatgcaaaacagaacatcaaactgtatcagcacaacctgtgacaaagtgtaaacaatttaatgaaaacaagaagttacctacaaagtacaaataatttttaaattctatatatatttataaagtattacatcctaataacttaaacagattttcagtctgtactgtttcaaccacgagtataacttttagccacaaaattacaaaaatgaatgtttctagaaaatttctaccacattcatgaatgtcaggtcaaaattctatcttttgtaatctgacatatcaaagggaaataaagataaggatttcatcaataatttccaataataattttttaaaacacaaatgaaaaccagaaaatcaaacaagtccagtccatgaggattctatgttgaaacaattaaggacctagtaatttttttaaaaaacttgattccactcaattaaagagtatttccttttaaaacatggaaaccagaatgttgtaactggagaggaggcaaagagtttcttgttagtttctcagacacttcaataggaaaaactataggtttgtttggtaaaagaatgagtacagtaaatgactacacatagccatcgtttttaactaccttatgggacaaaactgttctcctgaacttgaaatgtaggccaggcacagtggcacacacctgtaatcccagcactttgggaggccaggactaggagtttgagaccagcctgggcaacagagtgagactctgtctcttatttatttaaaaaaaaaaaaaaaaaaaaaaaaggctaccagtttcttccacatttctcaacttaaaaaattttaaaacctacacatcagtcattccggctactaagatgtacataaaaatactatttaaatctttcaacaaaatgcatgttatgggataaaggtattttttcccctacgttggtaaaagatgtctgctttagaaactgattcctcagtttcagttaccacatctcgacagcttagtcccctatgaagactccattccctatctgatatttaactgtagataacatagagtttcaatcttctttagataaacagcaggttttttttttttctttttttgagatggagttcactcttgttgcccaggctggagtacagtggcacaatccaggctcaccacaacctccacctcccaggttcaagcgattctcctgcctcggcctgctgagtagctgggattacaggtgcgcgccaccacgctccgcctatttttgtatttttagtagagacagagtttcaccgtgttggtcaggctagtctcgaactcctgatccgcccaactcaacctctcaaaaagtgctgggattacaggtgtgagccaccacacccagccttgttttttttttagacagggtctcactccatcccccaggctggagtgcagtggcacgacctcagctcactgcaacctccaccttcgggttcaagcaattctcctgcctcagcctcctgagtggctgggattacaggcatgtgccgctacgcccagctaatttttgtaattttagtagagacagagtttcgccatttggccaggctggtgtcaaactcctggcctcaagcaatccacctgcctcagcctcccaaagtgctgggattacaggagtgagccaccacgcccggcctagggcaggttttagaagctgaagggagacttgttgggagtcctaagatcataccataactagctaaaaggtgacaggaagaaaactgcccagtctcattcccattgtctcctagaaggacttcaacacaatgaatgcaaaataaaattactaatcaattgataagtaattgagaaactaaatgatgggcattctaatgggaaagagcctcaaagagtaggagagatgtgtctgtaacagaaaaacattaggcttccctgggccagtaagaaacaaagttttcacttgttcatggaagaagaggaaaaaaaagacgatggattatatttcacaagaagctacatctattcaatttatggaactatcctttactcagaatatatacttccttttttatgtaatagattattcttttatttagaaagggctaagttgatagcagttttgaatcctgagttattttactgttatttgcatcctcgaaattttgattttttttttaagacagtctcactcaatcacccaggctggagtgcagtggcacaatctcagctcactgcaacctccacctcccaggttgaagcaattcttctgcctcaacctcctgagtagctgggattacaggcgcgtgccaccacatgtggctaatttttgtatttttagtacagacggggtttcctcatgttggtcagtctggtctcaaactcctgacctcaggtgatccacctgcctcggcctcccaaagtgctgggattacaggtgtgagcgatctatttaaaatgtcataattatgtggaaattttactaagtcttatgtagactgagcttctatccccctagtggctcaagtccttccttcttatgtacattcacatctgtgtttctttgccacatccagcaccccaattcagtctttcatcattgctgtcctggactatacgcaacatcacaggtgctcaccctgctcttttctctttacaatttcacctagatgacattagcatgccttttttttttttttttttgagacagggtctcgccctgttgcccaggctgccgtgcagtggcgcaatctcggctcactgcaacctccgcctatcgagttcaagcgattctcctgcctcagcctctcgagtagctgggattacaggcgcccgccaccacacctagctaattttttttatttttagtagaaacggggtttcaccatgttagccaggctggtcttaaactcctgacctcaggtgacccgcccgccttggcctcctaagtgctgggattacaggcgtaagccaccatgcctggccaacattagcatgttaatctttatttatttatttatttatttttttaagacagggtctctctctgtctcccaggctggagtgcagtggcacaatctcagctcactgcaacttccacctcccagattcaagcaattctcctgcctcagcttcccaagtagctgggattacaggcacccaccaccacacccagctaatttttgtagttttagtagagacagggtgccaccttgttggtcaggctggtctcaaactcctgacctcaggtgatccatctgcctcggcctcccaaactgctgggattacaggcatgcgccactgcgcccaggcacatgttaatcttcttaaaacgccaccctgattatgacagtccccaaactggaaaacacacagctttacttcctagaagaccaagtccaaactcctcacctgagcatcctaatgcaatctaccctgcttttcccacctctcactgctcctctacatgggcaagtaccctaaactggccccctccctgtcatctaaatcctctgtatttcctcatctttgaggcttttctcagttactgcccttacttgtaataccactgtctttacctattaaaccctatccagcctttaacatctacctcaaaactcacttaataacaaaagctaacatcctgttgccgctataaccagtgaaaacaatttaagttttaaaaagaaaaacgacagctaacaactgagcgcttactatgtgctatgcagtgttccaagtgctgaacatgcatctattgatttgatcctcacaacagcccaaaggtaagtagcagcagtaacttcatttgatagatcaggaacctgaggtatgtcatatagattgaagtcacatagctaataagtcgccagctgagcttcttcttcttcttcttcttttttttttttttttttttttgagatggagtctcgctctgtcgcccaggctggagtgtagtggcacaatctcagctcactgcaagctccatctcccgggtttacgccattctcctgcctcagcctcccgagtagctgggactacaggtgcccaccaccatgcgcggcgaattttttatatttttttgtagagacggggtttcaccatgttagccaggatgatctcctgacctcgtgatctgcccacctcggcctcccaaagtgctgggattataggcatgagccaccgtgcccagccctgagcttctaacagaagctgtatgactccagagttcaacctcaaccatcatgatgcactctccaactagttccaagactgttttgctttgatcatctcaagagaaacggacctttgccctctgaattcctagacaggtaagtcaattcctgcttgattagcaatgctatcaccatgactcccgcactctttgctgaagataagcagtgaacgagagacacaaatcttgcctcgggcccggcacggtggctcacgcttgtaatcccagcactctgggaggccgaggcaggcggaccatgaggtcaggagaccaagaccatcctggctaacatgttgaaaccccgtctctactaaaaatataaaaaattagccgggcacggtggtgggcacctgtagtcccagccactcgggaggctgaggcaagagaatcacttgaacctgggaagcagaggctgcaatgagccgtgatctcaccactgcactccagcctgggtaacagagcaggactccaactcaaaaaaaaaaaaaaaaatcttgcctcaaggagcttctattctagggaatcgatttgctaatatcctcattagagataaataaattttggaagaaagtgaatgagaaaagctgtagtgtggcccaggaataaagccaaagggccttctgtgtctaggagctctcccacctgtactgctcctgctcgtagaggtctgccacgatggccagcagacggctgatgaaggactcgctgctgctctccttgtttgcctgcgcagccaagagagcgcagcgcttctctgtctccgccagcttcttctgcagcttgacatactcctgccgcagaagcatcaagtgcttctccaacttggccacctcctctgcaaggaaaacgaagaatcaagttcaccgtggctgctggaaagcaggtggcattcactaatccctcatcccatagacaggaaagctcccaaagtgactggccacttgaccgttccactctttcttagtgatagtcctacaggatcaagaatggctttgacggctgggtacggtggctcacacctgtaatcccaaaactttgggaggccaaagcagggggaatcacttgagcccaggagtttgagaccatcctgggcaacgtactgtctccacgtttttaaatattcattaaaaagaaaaaaaaagaatggctttgtttcagggtgctggtcactgaaccaggaagaccatcatggttacagggatttctcctctcagaagctcaatattatacagtatatgacaatgaagagatgtacctaaagatgctgacaggcacttgccccacaaaatccttcaccataaagccaggaattctccaggagaaaaggctaccaaaatcacctagattttttgaaaccactaacagtaacaacaatttcctaattttcacatgttcttctaaatgctttacataaattccctcatttaatctctctctctttttttgttttttgtttgtttgtttgtttgtttgagacagagtcttgctctgtcatgaggctggagtgcagtggtgcgatctgggctcactgcaacctccgcctcctgggttcaagcgattctcctgcctcagcctcctgagtagctgggactacaggcacatgccaccatgcccagctcattttttgtatttttagtagagatggggtttcaccatgttggccaggatggtctcaaactccagaccttgtgatccacccacctcggcctcccaaagtgtcgggagtacaggcatgagctaccgcgcccagcctctttttttttttaaacagatgagggtctcactatgttgcccaggctagactcaaactcctggactcaactgttccccctgcctcagcctcccacagctgggaccacaggcacatcccactgtgcccagcttcatgtcatcttcatgacaagcctatgaggtaggtactgctgtataccagccccattttatagaggaggacactgggacacagggaggttacagatttcccctgagttgcaaggctggtgagaggacgggctgggatctgagcccaacattcttattccagggtctgtaatcatatgaactatgctctccaaccctggcacctatcctccttcaggtgaggatcagggcagtcaataatggttcagatggaggcatgccatcttccgcaggtgcgctggggcaggttaaaaggttgagaaccaccgtatttgattaactaaattcaacaagcatttatcagtgttcacgaggcgctgggcgctgcacgatggtaagtgcactctgacatacctgtcactggagccctgagttactgagaaaaacaaagataaacaattttttttttttttttgagacagagtctcactctgtcgcctgggctagagtgcagtggcacaatcttggcttactgcaacctccgtctcctgggttcaagcgattctcctccttcaacctcccaagcagctgggatgacaggtgggcaccaccacgcccagctaatttttgtatttttagtagagacagggttttgccatgttggccaggctggtctcagactcctggcctcaagtgatccacccaccttggcctcccaaactgctggcattgtaggcatgagctaccatgcccagccataagtcaaataacttttgttataatttataattaaaataattacaacagtcaaatgcaaaattacaactctacattagagagctagaaggtaaaaacagctatgagagcctataaagcaagttaatggaaaaggtcaggaaaggcttccctgaggaagccgtcatgaaacttctccttcacctgagctctggagtcttgagaagggatgagatagggggtttatgcaaccatgcaaactggcagctttatcaatcaaggtctctacggctccacactgctgctacaatcatcctccgggccttggtcccttcacccctccctcttccacatcacagacattccaaatcttgacactgccctcaagcccatctcccatccaacctgcctcattccatgccaacaccctgagaaaactgagctactgccaataactcccaccatcccagcaatgattcccatctcccctttgcttcctcagaaagggtatctccttcctacccaagtttaatcccccatgtgctccctaaatctgatcgctctcctcgatcctcaggacctttctttatcatcaaccaccccatctccgaactccagtctctctttcacctgggtcctgctagtcagcatacgagccagtttaagtctcttatctattaaagcatcccacttccacatcacatctgaaatcctcagccccgccatctctagctaccatacaccactgtctcacctgccattccctcttctgtccccaccatccccttgaaactcctctcacctatgaccctctagttgccaagtccaatggactcctgccagtggttctcctcctagacctctgacaccacattgcactgttgtccatcccttctcttactccagcaaccacaataccatcctctgattctggttctctgtctctttcacgtgcttccctgcatcctttcccaatcttttctttttctttttaaagaaatagggtctctgtcactcagcctggagcgcagtggcacaatcctagctcatcacagcctcaaactcctgaactcaaactcctgaaactcctgaactcaagtgatcttcccacctcagcctcgagagtagctaggactacaggtgcttaccaccatgcctggctacattttaaactttctgtagagatggggtatcactatgttgccaggcctggtctcaaactcctgggctcaagtgatcctcctgacagcctccctagtacctgggaccacaagtgtgtgccatcacacctggctataaatttttaagttttttggagagatgggccttgctatgttgccagggctacgttgtcttgcactcccaggctcaagcgacccacctgcctctgcctccagagtagctaggaccagaggtgtccatacttgggaggctgaggcaggaggatccccttgagcctaggaggttcaggctgcaaagagccgagattgtgccactgtactccagcctggacaacagagcaagaccctgtctcaaaaaaaaaaaaaaaaaaacaaccagccaggtctggtggctcatgcctgtaatcccagcactttgggaggctgaggcgggcagatcatgaggtcagttcaagatcagtctggccaatatggtgaaaccccatctctactaaaaatacaaaaattatctgggtgtggtggcacacaactgtagtcccagccactcaggaggctgaggcagaagaatcgctggaacccaggaggtgaaggttgcagtgagccaagatcgtgccactgcactccagcctgggtgacagaggacagtccgtctcaaaaaacaaacaacaacaacaaaaaacaaccaaagaaaaaaaattatgagtaatagagaagacaggcaattaagccaacgcagtaaaccctgagagcactctgataggggatacaaatggagtgtggcaggagacctcctggtttaagctagtgtaaagaaaatgttccagaaaagtagtatcttacttcaaaagatttaaataaagcctgtatttgtttgtagcatactggacccagaaaatgcaagagaaggtttcgatcttttattttcttggtcagattctccttttaagcttgtatcagtcaacagatttgtcaaacagacaaagtacataaacacagtatatttctctacgagaaatacaaataattatgagcccaagcctcgccctctcctccaagagttcactgacaatagtatcagccactcaccagatgctatgcaagtcagctgaaaaggatggctatagtatataccacatcttgctagttcaacctggtggctacaaaattatatcccacttgccaagagacagcccccaagtttccacagtggtaaccttttcttccataagcaacctgaaccctctaaccttggtttcaatcacaccatattctagccaacctaaatcttttgctcctcaagacctccaacccagcatgactatagctggctggggaatttccatttccatttcacttaaactgttgatctgcaaatatttatgcattaagcattttggcagattaggaggtgcctcttttaagagttaaaagggcaatctaggctgggtgtggtgtttcacacctgtaatcccagcactttgtgggtcccaggcaggaggatctctaaagcccatgagtttgagaccagcctgggcaacatggtgaaaccccgtctctacaaaaaaatacaaaaatgagccaggggtggtagtgggcaccggtagtcccagctactcaggaggctgaggcagaaggctcgcttgagcctggtaggacgtagaggttgtggtgagctgagatcgcaccactgactccagcctgggtgacagagagagaccctgtcttaaaaaaaaaaaagagagaaaaagaaaaagaaaaaaaaatgactgcaaagttgctgattcctctatctaagccttcaaatggaggagatcctgaaagctctgtttcagccatcttccccctctctgctctctaggaaaccatacacatttccttaaatatcagttatacacataaattccaaaatctacagcaacagccccagtctctctacagaattcctgattcaaatatgtagcagctgcctggacaatgacacaagatataaactaccaaggtaatgagcagagaagaagctagataaaaggagggctttagcatgatttggggctcttagtcacaaaattacagatgctcccccacccggcagcttttgtcgggggaaacccaaaggatcactaatgcactcaggcagcttatgagcacttaccagcgctacttcaattgccataccatttcacagtataatggaggagtgcttatggctgagacattaccagcccgtggggaatactgtctgcttacaaacagcaatgcaaatgtgtccttgaagtgtcaccaagctgtacagttcttacaagaaaaagtacaacattattctgagcaaaatggagagagaatttacagtgtgcaggttctagggccagactgactgggatcaagcccagccccactactgcctagttttgatacaccttaggcaggtgactcattctcttcacctgcaaggatgttgtaaacactgaaagtactaatacatgtaataaccttagaatacaacctgctctgcagtaggtggtcaaaatatattagctattattacaattcttagaaaggcaacccggggtagtcagtcctgtgttgcaagattctccctgcacactgatagcccagagctcgcattccagagtctcactgactgggtttgaccccagcttacccatttactagctgtgtgaccttgggcaagttacttacttcctctctgtgcttcagtcttctcacatggaaaatgagactaatgatactatcttagagcaggtgtccccgacctccaggccgtggacgggtactagtttgtggcatgttaggaactgggccacacccagcaggaggtgagctgcgggcgagtcagcatgaccacctgagctccgcctcctgtgagatcagcagcagcattagattctcacaggagcgtgaaccctcctgtgaaccgcgcatgcgagggatctaggttgcatgctccttatgagactccagtgcctgatgatctgaggtggaacagtttcatcctgaaactactcccttccctaccccatctatggacaaactgtcttccacgaaaccagtctctggtgccaaaaagattggggaccactgtcagagaagtacgtgtaaagtcattaggataggttaaatcactcggaacagtgtctggtttagtaaggcttaccgctgctgctactcctctgcctacttattcttcatcaagtgaccagttttcagccgtggttttttctttgtccccttccaactttcatttgaaaagcaagcctagaaatttaattagccgggcatggtggcgcatgcctgtagtcccagagatgatgccactgcattccagcctgggtgacagagcaagactctgtctcaaaaaaggagaggagagaggagaggagagcaaacctagaaatttaaataatagataaaacctagagtttcaccaaaaaagctacgctaagtatcagtgaagaatgccagaaacttccaattttctcatatttctttccaaataatacctatctgttctccatgagtgcagtctatgatcagactttcaataagtattctttctgatagttcatcactcttgagttaacaaaacatgcttaagacaaaaaaatcttcattcattacaaatagcctaaaataaagagtgcaatgtctactgcaaaaaagtagttaatcagcaaattacctcttcagaagttatatggcacagtcagaagagaaaccaagaatgatttttagaacactcttccttctaggtcaggagttggcatactttccgtacagggccacatagcaaatattttaggctttgggagccatacagtctctggggcactactcaactctgccagttggaacacaaaagtacaaattaatgaatgtggctgtttccctaaaaatactttatttatgaacactgaaaatggaatttcatataattttcacatcatgatacattgttttgatttttcttcaaccaggttaaaatatttaaaatatagttaatatttataagttatttttatatgttacatctataacatataaataaattcttagcttaaggactgcataaaaacaagtcgacaggtctcaggtcagatttggctgagaggccatacaagccctgtccccctgctggtgattttaaagaattagaacgttaaaatgacagccagagccaaatgaaaagggaagaaagcagtttatctatctggaacacctagaattctgtaacctctcacttcttaccaaactctaatccacaacagcagccactgcatcttcaagatatgcctgtctccaagcttacctcctcaccctcagaaacaggctcacagtaatgcctcccacccctagacaaacatctcttctccacagttatgctcttgactgcgcagtctatcatacactttgccttctccacccatttcttaagagtcctctttggtcactacttcctgccttacctccctaaccttctgaaacttggcttcaacccacatcactctactaaatagtcacaatgatcaaatcacccactttgatgaccttttccttattcttcaagctcctcaacctctctgtagcctccgactctcaaccaccccattcttaaaactcttgttttggcttcctaactctgtactctagctttcttcctaaccttgttacagacccttcacctcctattctgactacccactttctaaaacggcacagtgctgcaaggtgcagacctacatctgaactttttctaaattttcttccctgaacatggtctcatgcatacccatactttactgtcactgctataaaaatggacccaaatctctctttccttcaacagctcctgctgaaagaatgactgactgctactataaactcgacaagtccaaaatcaaacttcatatcttcctcaaatcaaagtcttcttcctacttcatttcatgttatcaaagctctaggttaccaatgtacgggctatgataatgcatttttaatagtataccaaacatacaaaatatttagagataaacttaacaaaatgtgcaatgcatgcacactgaaactataaaaacactgctgacagaaatgaaaggcaacctaaataaacagagagttatatactacgctcatggattggaaggctcaatagctcaatattgttaagatgtcaggtctctccaaattggtctatagatccaataccttcccaataaaaatcccagcaaactgtgtttgtagaatttgaaagaatgattctaatttttttttcttagaaacagggtctccctctgtcacccaggctggggtgcagtgtcctgatcataactcactgcagcctcgaactcctaggctcaaacagctagaactacaggtgagcaccaccacatctggccaatttttttgtagagacagggtctcagtatggcgcccaagctggtcttgaactcctggcctcaagggatcctcccactttggtcttttaaactgctgggattacatgcatgcataaccacagacagctgattctaaaatttgggtggaaatgcaaagttcctagaatagccaaaaaaattctgggcaggggaaagaaaaaggtttagcatttacctgactcaaggctgtgtataaagctacagtaaataggacagcatcaaactggcatcaagatagatatccagagcaatggaaaataacagaatccaggaatagactttgacttatacaaatgatctgacaatggtgtgaaggcatttcaatgaggaaagaacaatgggaccagaacaattggagatccatatgaaaacgcaaatccctattcctagacaccactacatataaaaactaactcaaaatcacatatctaaacgtaagggttaaaactgtagcccttctagagtcagatgaagtcccagctactcaggaggctggggaggaaggatcacttgagctcaggagtttgaggctataaagcactatgatcacatctgtgaatagccactgcactccagcctgggaaaccccatcttcctgtctctttaaaaacaaaaacaaaaagaaaacaatttttaaaaatgagcttcaaatcattgacaggtaaaatttttaaaaattaaataaaaattaaaaaaaaaaaaaacaaaaactacagaacttccagactaaaacatagcaaaaatcttagtgacctcagattaaacaaagataaactgttaaaaaaaaattacagaagaaacatggctaaatttgactttaccaaattttaaaaactgttcttgaaaagtcataaaaaaataaaaaggcaagccacagactgggagaaaatatgtgcaaaacatccaacaaaaaacgcctcattcccagcctgtaatcccagcactttgggaggccaaggtggatggatcacttgaggtcaggagtttgagaccagcctggccaacatggcaaaaccccgtctctacaaaaacacaaaaattagctgggtgcagtggcgtgcgcctgtagtcccagctactagggaggatgaggcaggggaatcacttgaatccgggagacagaggttgcagtgagctgagatcataccactgcactcaaccctgggcaacagaacgagactccgtcttaaaaaaaaaaaaaaaaaaagacttgtatacagattatattaagaactcttacagctcaataagacaacccgataaaaaagagcaaaaaaactggagagttcaccaaacaagataaatgtacagtaaataagcacatgaaaagatgtgcatcattagtaattaagatgcaaattgaaatcacaatgaaataccactacacacctactagtatggctaaaattaaaaagttatggcaaagatctggagaactaggccaagcgcagtggttcacacctataatcccaaaagtttggaaggctgaggcgggagaacagcttgaagctaggagtttgagaacagctgggcaacagagtgagacccccgtctccacaaaaaaattttaaaaattagccaagtgtggtggtgtgcacctgcagtcctagccacttgagaggctgagatggaaggactgcttgagcccaggagttcgaggctgcagtgagctatgatcataccactgcaccccagcctgggtaacaaaaaacaaacaaacaaaaaaaaaattggagaactagaagctagaagcctgatacattgctaatggaaatgcaaaatggcataaccattctggaaaacagtttgatggtttcttataaagctaaacatatacttgccttatggccaacaattccactcccagttatttcctcaaaataaacacaaagaattctatttaaatgttcaatgaagctttattcataacaactggaaacaaccggaatgtccagctggtaaacagacacaactgtcacacatccatataatggaagagcactcagcaataaaacagaagggactgataccagacacatgaggtacagatgtatctcaaaagcaatatgctacgtgaaaggagccaggcaaaaaagactacatactgtatgaccccatatgaaagtgtagtttcatagtaggcaaaccaggatcacttgaggtcaggagttcgagaccagcctggccaacatggtgaaaccctgtctgtactaaaaatacaaaaattagccggaccagggtggcacacacttgtaatcccagctacttgggaggctgaggcaggagaatcgcttgaacccaggaggcagaggatgcagtgagctgagatcaagccactgcactccagcctgggcgacagagccagactccatctcaacaacaacaacaacaacaacaaaccatactaggcaaactatagcaagagaaagcaaatcagtgattgccagaagccaggggaatgggactgactgcaaaggaggtcaagggaactttttacggtgatagaaatcttctagcatgattgtgctggtggttatatgactgtatatatttgtcaactgacagtttaaattggtacattttattgtttgtcaattacacctcaataaatctaacaacaaactccttcctctgggatgtaccgtgacatctttctattccttgctgatcacaccaacatttccttgaggccttagcatcattcctgttgcccttctcatccttctacttctctattctatcccacacacatcgttattaatcttcctaaaacacagctcacctaaccaaacaatttcagctggttccccactgtctacaaaagtaccagtttcctaatgtggcattctgattcactgaagaagtttcttgagcccagaaaccatcttattcacttcactggtagtatcttgaaccatgtggcatgcgtggtctttgagcattcagaaactgcacacagaggaatttcagacatcttctgacttaataaactacacgactttacctaccatggcaggcagaaaaatgacacccccataagatactaatatcctaatccctggaacctgggaatgttaccttatatgacaacaacaacaacaactaagtgtctctgcattgaccaaaacatcattatgcagcacgtaactgttcatgtatccttgtaagagggagcaggggctggccgcggtggctcacgcctgtaatcccagcactttgagaagccaaggtaggcagatcacgaggtcaggagatcaagaccatcccggctaacacggtgaaaccccatctctactaaaaatacaaaaattagccaggtgtggtggcaggcgcctgtagtcccagctactcgggaggctgaggcaggagaatcgcctgaacctgggaggcggaggttgcaatgagccaagatcgcaccactgcactccagcctggaccacagagtgagactccatctcaaaaaaaaaaaaaaaaaaaaaaaaaaaaaaggaaggcacagagggagtctgacccactcagagtaggtcttgtgaacacagaacagagagaaatttgaagatgctgtccttgaagactggaatgatgcagccaatagccaaggaatgtcagcagcctcttgcaggtggaagaatcaggaaaaagattttctcctagagcctccagagggaatagggccctactgagaccttgatttgagcccagtgatactgatttcaatcagacttctgtcatccagaatcataagaacacgtttctgttgttttaagccatctagcttgtggaaatctgttacagcagccacatgaaactaaaacacctatacttacaaacaaaaaattctgtatagtaaaagattttaatgccctagtaactttttgctagattagtgtcaacatcattctatggagtaaaaggaaatgtacactttcctgtaatattttgcaataagacagaaagtgggaattaatattttttatgtctcctatggcagttaagttcttcacattcatcatctcagattctaactatattgaaaaagtaatatactaacagtgaaactcacttaagtgagttgcctaaaatcacacaattagcagaagacagactcaagatttgtggtcttaagccagaacgcatcccattaacaccatgatgccagatttcagctccagtatcagaacaccaagattagtcattaattaatccaggaattaaatgagctccttcatttcctatagtaaatgcactctactcccctccagccactccagttctaacccacactgtattcagtctttctagattcacatcaccctggcatttcctttctctacactcctatagttcttctattctagccaaaactttagcaatgaattagtgttcttcatgtaattctttttttttttttttttttttgagacaagagtttctcttgtcgcccagactggagtgcaatggtgtgatcttggctcatggcaacctctgcctcccgggttcaagcaatcctcctgcctcagcctcctgaagcagctgagattacaggcgcctgccaccatgcccagctaatttttttgtattcttagcagagacaggatttcgccatgttggccaggctggtcttgaactcctgacctgaggtgatcccctggcctcggcctcccaaagtgctgggattacaggcataagccaccgtgcccagtctcttcatgtaattctttaatgactaaatgactttatacctattctgctttaactatgtccattagataaaagagaaatgattgtaaaggctgtgataacattctatttggagaactacaagaataattttttgttccaggcttatattaggatcttccacaaaaaaatatttcattaaagtgtcagcttcccagaaaatactatcttccttggcatcagattagaaaagctcttcactggtgattaattaccaccactactacttttcttttttttttttcttttgaaacggagtctcactcttgtcgcccaagctggagtgcaatggcgcgatctcagctcactgcaacctccgcttcccaggttcaagcaattcttctgcctcagcctcccgaatagctaggattacaggagtgcaccaccaagcctggctaatttttgtatttttagtagagacggggtttcaccatgttgctcaggctagtctcaaactcctgatcttgtgacctgcccgcctcggcctcccaaagtgctgggattacaggtgtgaggcaccacgcccagcccacaaatatggatgtttaaaagctcccaggtggccaggcgcggtggctcatgcctgtaatcccagcactttgggaggccaaggcgggcggattacgaactgaggagatcgagaccatcctggctaacagagtgaaaccccgtctctattaaaaatacaaaaaattagccaggcgcagtggcgggcgcctgtagtcccagctactcaggaggcggaggcaggagaacggcgtgaacccgggaggtggagcctgcagtgagctgagatcgcaccactgcactccagcctgggcaatagagcgagactccatctcaaaaaaagaaaaaactcccaggttaactgtactgtgcagggttctccaggttgagaactatgtactaatggaacgagggagagaggaaagcacagatgtgagaggtgtacagcatccgggggatttggtgactgatgcagatcttggggggagtcggagataactttttggtgactgacttgagagtctggctgaaaagtagtgccattaatcatgaatatagaagagaaaacctggtataactagaaagcaacatgcatgcttatttgaaatactttgccttcccctctctgttctgcaagttccattaaggttaaggttgtgtcttgctcattttgtcatctctggcacagtagcttgcacctaccgtgaaatacgtttttcctgaatgcaattcaactctgctaggttcgtctgcctcatgttacagttggtggcatgacttacacatctttcaaaagctcaccgtgtatagcagtgacaattgggctggtttcataagagatgcataacaaatattagctaactagccatttccaccccaaactcctgactggaaacacttccaacttagacatcaccacatagaagtatactgggcaaagcaaatatgtccaaaagtgaggtcaaaatacttgttctccaatctattcctcctctacctcttagcagctcagccatttgtctgagtcatccagacctagaacttgagtcatctttgattctctctcatcaacattcaaccaggtttcaaaagtcctgtctttcatacgttctgtggtctttctcccatcagtcctcaccagccccacagcctctaccaaatggctcaccatcaactgctacagcttgctctctgacttcctttcttcccaatccatcctctacactgcagtcatttcgccatgcctcacacaattcctgttctgtcgctaccgtggctgattcctttcggtagtatcgctccatgagtctcagaataaaatccaaatgctgaaccaatgcccttaataatctggcccttaacatactcttccaacttcacatcccactaattccttccacctagaacagtgacctctcctcaatctcatgtccccatgtccaaaggagggccatttttcaaagctcagttcaagcaatgtctcctgcaacaagactttccctgattatccaaaatacattccccattacttccttaaaaaatctctccctgagttttcaaagtaactcctaagcattttttacccttcaccttaaaatatagtttctcatatacaatttcttttatctcccctcctagacttcagaactccctgtgaataagctttagttctggctattcgtatttaactatcaattacttctccctctatacccattccatggttatctcctcctcccgacagtaccttaccagatggagttcaataaataccacaggttcaacaggagattctggggacatagcaatttctcatttggttcagcaaggctgtaaatcatgatagtatctcaaattgcctacagcaaatcaccttgccagtgacagaatcctgtgtatctcagcacaattcagtagctttactttgacataaccactaatggataaattttatttctcagtaaaaataattcacaaggagaaagctaacagctacagctggtgacagtagtcaccaggaaagggagagaaaagaaaagaatggtataaaaggaacagtccttaagaggtctctggactatatataattatcaatgacctgggacatttgttcaataagtaaaacaataaacagataaatttcagaagtagggccgggcgcggtggctcacgcctgtaatcccagcactttgggaggccgaggcgggcggatcacgaggtcaggagatcaagaccatccttgctaacacggtgaaacctcatctctaccaaaaatacaaaaaattagccaggcttggtggcgggcgcctgtagtcccagctactcgggaggctgagataggagaatggtgtgaacctgggaggggagcttgcagtgagccgagatcgcaccactgcactccagcctgggagacagagccagactccaactcaaaaaaaaaaaaaaaaagtggaaacagcaaagttccttctttccttatttctaccagcctccactaatgaagcattttctggaacaggactatccaaagcacttctggcaatggtgcaagtgttctattaatctgtgctgtccattagggggagctactagccacatggctactgagtacttggaataggactagtacaactgagaagttaattttaaattttatttaattttaatcaaatttaagtagccacatgtggctagtgactattgtgttggtcaatgaatacccaggacatggaatgttttccccattttgcttgggttgttgtcaaaagtatttttctgatcaaattccatcaagctaacaaaagtttatgataaattttctgttcaatatactatttacaaaaaaattacatttttttcaatttttacttttactgaggaaaagaaatggagagtgattttagaggagactcaagagaaagactgtgcaccagggtgaaagcatcaggcgctgtgggaaaagcatcagtcgctgtggaagaaacattaggcgctgtggaaaaaggctcttcctgcaactgagaaatatcctaggattcccacagctacttgtgagctacagatgatcccccttttaaagctgaggacactgagactgacagcaattaattgacttgcttatgatcacagcttaaactaggatttaaatccatgtccagctgcagagtctgagctcttaaacactacattttattttattattattattttttgagacagtctctgttgctcaggctggagtgcggtggcgcgatctcggatcactgcaacctccaccttccgggttcaagtgattctcctgactcaagtctcctgagcagctgggattacaggcacatgccaccatgcctggctaatttttgtatgtttagtagagatggggttccaccatgttggtcaggctggtctggaactcctgacctcaagtgatccgcccaccttggcctcccaaagtgctgagattacaggcgtgagccaccgtgcccggccttaaacattgtattttagttgctaaaacaaaaatgggctggatgaaaagtaggttaggtagctcctagcagacttaggttatgcagagtataataaaaggtggaccagccagtttgcttgacaagaggctaaggatgtatccaggcaacttttcttgatggctagcaggtgatgctcaataaattcatacattccttcaaccacagccatgattctaagctgggagatacaggagtgagcaaaacagaccaagttcctgccctcatggggtttatattccagtgagggatgctctctaatgagatgacaactgaacagacactgagtgaataaagtgggtcagttgtgtggagaaacagcggaggactgttccaggccaaggaaactgcagggacaaagacgcagaggtagcagcatgtcgggcacacacaaagaacgcaaaaaagtcagtgtggcaggggcacagtgaatgaaagtaggaaataagctcgaagtgttaagtggggcccacaccctgttaatacttaacagagaactggaatatattttaagattacggagaagtgtgagagttgggcattgaggggcaggagtattaagaagagtaggagagacatgatctgattgatgtcttaaagggaacactagaaactgtgaaattaggctgtgagagagcaaaatctaggaggaaaagttaaaagcaaacttttaattggaaccttttgaagtagttcacttacaaacgaagcttagggctgggagcggtggctcacacctgtaatcccagcacttcaggaggcccaggcaggtgaatggcttgagcccaggagttcaagaccagcctggacaacatcacaaaaccccaactctacaaaaaatacaaaaattagccaatgtggtggcatgcacatctgcactcccagctacttgggaggctgaagtgagggaatcacttgagcctgggaggtggagattgcaatgagctgtgatcacgccattgtactccagcctgggtgacggagtgagatcctgtctccaaaaaaaaaaaaaaaaaaaaaaaacccacaaatgaagcttagattaagcaggatagccacagagatgtagagttggggaataaaactaattttaggacagactttagctaaatatatatggtcaaatgaatagccatggatagatggaaggaaagaaggttgttctctaaacaagtcacataagaagctgtatcctcagtctctcacgatcctatttactattcctaggcactatctcccacattctcacatggccaaccaaccattatcagggaagttcccatagtgtgtttacagatcattcaagttatatgacacagatatctgctatttatttatatttaaataactgtctccaaacaagcatagcaggctctgagaatctgattaaagcacaagcagtagtattaatatcccaagaaacattttctacctaatcttgccttcctttgcatagcaagcaccttcagattaataagctaaatgacccagaatgcctcctagttgaagtctgcaacatcgtttctaaaaagcttaaatcccaacaaaaagttgggacacaaaagaggtaaaagaaaaactgtggccggccgggtgtggtggctcacaccggcaatcccagcactttgggaggccgaggccggcagatcagctgaggttgggagttcaagaccagcctagccaacacagtgaaaccccatctctacaaaaattagccgggtatgatggcgggtgcctgtaatcccagctacttgggatgctgaggtggaagaatcgcttgaacccaggaggtggaggctgtggtgagccaagattgcgctattgcactcccgcctgggcaacagagcgagactccctcaaaaggaaaggggaagggaaggaaagaaagactgtgaagtcagaacttcatgactgcttacctagctatccccctgctaatttaaccctgaaaggatgtcttcttcgtgtgtttatggagagacaccccactggcgagatgtctctcaaggcgcttgccggatgatgagtatgctgactcagcctgtatgagctcctcagggctggaacccgactgcaaagcacagcaggtgctcagtaaagctgctgaatgaaaaaccagcagccctccacaatctcaaccttgctaatgtattcccaaaacaccgaacttaccttcctaagtgcaaaagcgccagactaccccttacctcacagaagaccttcctgaacctttctacccgcctcactcctgtgagcaacagctgtctgctgtgtacaacattccgtgatttactcaaaaagcaacttcagggaatcccttgggtttttgctccttttcttactcctctgccttcaggcaatattcacctaaagtttccccctccagggatatggtagaaaaagtaaagacaaaaactgggtgcctgccgggcgcgatggctcatacctgcaaccccagcacttagagaggccaaagcggatggattgcttgagcccaagagttgggagaccagcctgggtgacatagtgtgacctagtctctctcttttttaagacaggatcttactctgtcgcccaggctggtgcagttcactgcaacctccgcctcccggattcaaatgatcctcccacctccctagtattactgcgaggaccacaggcacccgccatcactccattcactccaggctggagtgcagtagcacgatctcagctcactgtaacctccgttttccgggttcaagcgattcttgtgcctcatcctcccgagtacctggaattacagacacgtgccaccacacctggctaactttcgtattttttgtagatacgaggtttcgccatgttgcccaggctgctcttgaactcctggcctcaagcgatcctcccacctcggcctcccaaagtgctgaaattactagcgcgagccaccacacggggccaagaccttgtctacacacacacacacccctttttaattagccgggtgtggtggcgagcgcccctggtcccagctactcaggaggctgaggcagaaggatcgcttgagcccaggagactgaagctacagtgagccgtgaccgcgccactgtactccagccggtgggacagagcgagaccctatctcaaaacacacacacacaccccccaaaaccaactgggtgtcagtcacagctatctctgtaactttgcctaaattcctttatcaataaaggcaaatacacacgccaggcctccttcacgaggttatctgaagtctaatgcaaatgagaaaagccgaccaactgtcaggtgctgcccaaatctaagatccatcaagtgatgggttcagtcaaagctcaaaaccaacaggaaaggtcgtggccaagcacactgcagtcactcaataaacaaaggtcaaataaggaatactgttctccaataatggggtgaagaggagaaccaggctgcccagatccaacaatgtccctgcacgattcctgacaggtaactccccgtctctgggccttctttccccctacgtgtacaataaggctttgacaatgaaggcttctaattactgctacattaagacaggcagactctgagagaccagagtgccttaagctgcaatgtcatgaaaagtgcacgagaccagagggtaggcactggacggggaggcaaaggcacagaggtctggtttgagcagccctcttgtgagcagtgtgaccttggccaactcccttcccgcaaaccccttcctcccgtcttcatctgtacgcctggcctgaaggctggggttgcagcagagccggagccgccagtgcgcccgcctgaagcgtgggccagctcgctgctgcctcgcccccaccccaccccacctcaccccaacccagcccgaggagacccacgctcttccgcaagcgagggatggaccccttccggatgcagaacgtgccaggacagcagtttcgatttcctaaggagaaggcttacttcccccggcgtcccggcaccgccggcaatcaagagcctcccgtgctgccctcggggccccgcggctgcacgcagcaccggcgcgggacctgccagcccggctccgcagccggccgcagtcccgcggggtcggcatcgcgggagggacgttgtcataggaaccgcgctccggaccccggcccgagaagctccggagaggctagacaggaaggctcgcgagacccgcggagcccccatgcaaccacgcccggccttcccctcccacggcagcttcgcacggccagcagcgcccccacagctccgtgtcttcccgcgcggctccacaaaaaaaccctaccttccgccatgtctggcccggcactgcctgcaacctcgcgagaagtgcgcggctcaaccggggcggtgcggaacggaatcaccaagtctcgcgagaatcgcgggaggcgcggcaaaaggcggagccgagggtaggaaagtgggtgaatgaaagcggagggggttgctggactctgggggaagcggagagccgggtttctttttaccgggtatttttgaggctcgagatttattaagcactgactgagccctgtcatattccacgtccttggcagggcaccgaaaaggatgacacaacgaatgcagactactctggagaagcttggcaatgagagggtcgagagagggggtttgttggtccttaggtttgtaaagaaaggagaggctgggagaaaggagtcagtggagaggtccctggggaggtaggatgctctgcatgcgatgcagaactcaggaaaacggattaaatttagactagaggcaggtcacctgttattccactaaaacggtaggaaacaagaacatgcgtgcagatatataggggggaagaaaatcagggagatcgtttgatgacatcgattttatgggtgaagttatgagacaaggaaggagaccaagaagagcaaagaaactttggaagaggacgctgaagttggaaggcctggtttcatgtgcctcatgtatgtgttgatggatcacttttttctagaactcagccaccaggctgcagtagcagatattttgaattatagcatttatccagggcttgggattgcattgcccaaaataaattgagggtgctatgagacgacagcccaggccatcaaacgtgggatacagactggctagggactgatggaggagccacgaaactgcaggtctctgataattgaaggccagtgcagtgcaggcaatgttgtgagagcttggtggttaaagtggcaaacaggttcatagtgaagtagcactaggagatgagaaaagtccaggacaggccgggcgtggtggctcacgcctgtaatcccagcactttgggaggccgaggagggtgaatcacctgaagtctagagctcaagaccagcctggccaacatggtgaaaccccgtctctactaaaaatacagaaattagccgggcgtggtggtgcatgcctgtaatcccagctactcgggaggctggggcagtagaatcgcttgaacccgggaggcagaggttgcagtgagccaagattgtgccactgcactccagcctgggcaacagagtgagactctgtctcaaaaaaaaaaaaaaaaagtccaggacagagccacggaatagagtggctgaagtggaagtgagaaggcaggaaaattagatgttgggatttagaggtaggaaaggaaaggagcatcaggagctaaaatctttggtgaatgtggggaggactatacgattagttaagacaattgcaaaatggagggctaaacagtaacatagctgaatagcatgagacctttcttgttttttgttttttttttttttcagagatggagtctctgttggccaggttggtcttgaactcctagtctcaagcagtcctcccaccccaacctcgcaaagtactgaaattacaagcatgagccaccatgcccggcccagcatgagacctttcaaaaaagacttttactcaagggagaatcaaaagaatgcatcaatagttcaggattgcagggaaagtggtggccttggaggacagccaggagtaagagacaaaaggttggaaggaaggatctgaattagctatacctggtggtgcaggcttttagttgtcgctacttgggaggctgaggctgaggctggagaattgcttgagtccaggagtttgggactgcagtgagctctatcctgccgctgcactgcagcctgggtgacagagcaagactctgtctctaaaattaaataagaaaaagaaaagaaatttaaaaagaagaatctgagaacagaataagagtgtcagaaacgaaaaggaggatttaaagttggagaagctttaggtgctgttaaggataagcattagtgggtagtgaggtggagtggaggaggaatttggagcttagatcgtgggaacatagagtcaagcactgaatttttgaggaagagtaggaattctggctgccaggtacctgggagatgagagacggtgttgaaacgtgtaagcctttttgttgtggcaggagacgaaaggcacgaagatggtaggggagaactttccctaccatgggaaggccatcgcttaaagcgtccctgtctgttgagaatggtttataggggtgcccaatggtgagtctttggggccttcagagtggccaggcaggccaggctcctctggatgcaagcagcctcatctttttatggtggagtaccctgcgaatattgcctgggccataacgtaaaagcaacatgaaagttgttgtaaagtactgtcacagctgactcccgattttgcatgatgactatcgttacctcagcagcaccagcctagggtctggaatatagcaggcactcaaaatgtttgatgaggtgtttccactgtgtgctattctgggaattaagagacctgagttcaagtttggctctgcagctacttgctgtgttgatgatgggcaagtccttgcaagccttatgctgcatctcagattctacctatttgacgaagaacttggactagaatccatggttcctaaagatttggagggccatgaccccctttgagaatttgatgaaaaccagagaccctctccgtttgagtagcacacaaatgtgtgccgtttcagtgtgcttggactggatggccatgatcaaagaacaactcgcctgaagggattgatcaactcgggggcttgactgcctcctcatcacaacctcgctctaaggagccctctaccagaggataaagtacccatcttagaaatgacttaacggtatccctgggcccttgtctggttttttttgttgtttttttttttggtttttttttttgagatggagtcttgctctgttgcccaggctggagtgcagtggtgcgatcttggtccactgcaacctccgcctcccgggcccaagcgattctcctgcctcagcctcccgagtagctgggattacaggcacacgccaccacgcccagctaattgtttattcttagtagagacgggggtttcaccatattggccaggctggtctcgaactcctgacctcgtgacccacccacttcggcctcccaaagtgctgggattacaggcgtgagccaccacgcccggccagcccttgtcttttgaggggactcttactgacctgtaacccctgagttagagagaaggtagtaaagcctatgaaataaagcactcatagtactcagtaaactacagcacccaccaggtttggatggagctataacattagctataaccagaaatacagacgtcttgaaaaagctgagcactggagcatggtccattttagacccacttcaggttttgcagtcagattcagagggacttagtgtggtgctgtctcagacaaggaacatgaagaacaggaagggaataaatgctgtctaccgtagcttcaagagcacaggggaacagactcaggaggcagtgcggtatcatggcagggcaggaagaggaggacacctccagtgctagtccgatgaattgggtcaagcaccggtctcaacacatccacgctctgtgagctctggtttcctcacctgtgaagaagggctaataacacccagtatgcaaggcaggcggtggaaccgaatcccagccatgcaacttgtgtgctgtgcaacgatggcaagttaacctgagcctgtttcctcatgagaaatgattaccttggaagctgcttctaacaatgtgactagaacctttaggaaaaacacatagcacaagcttgccacagaagagaggctcaacaaatagaaaaacttgatttccagcgctcttgttgggaataaatggaagtcactgtgaatattgcatactgccgagaagaggaaaaaaatcaagtttcttgcctaggactttctgtgcagctcctatgtcttagaagatgtgtttggctcccttttgtgaaaggcttttccttcagtttatttacctgtgtgaacagaattcaaaattctttcatcatttcgctaaagctcagtgaggagtgtcaactccacaagccaaaaagcctaatcctacgttggcagccagattacacacatctgaaattgaaccaccagaaataccatacccagaaaatcatttgatctgtgaactgaatcctgtgagggttccgggcctcctcaaggcagaaagggttcaatttgaaaggcggttattagccctgtcccatgagagggagcgggagatccacatctttcctgggagcctcgtgccttgcacacaccatcgaaaacctgttcatctgcactggaagcagcatgcaaataaaacgttttggctctataccttgagtagctgattatgtctaaaactgatgtaagtttggggatatatattgtctagacccttccacaacagttcattccaaatatatttatcgggtatttgcactctagaaataatccctcatcttcccaaaactcctctcgggggattttcttgttcataatttagctgaataagaggtctgactccatgttcctttctccgagtttgtaaggaagagcccttaatagtcgctagtgatttatatcaaggacaaacaagctttcaacatctaacactaactccgtatgaactatttgtaaggattcaggataaaaagctggatgttgatatcttgtgtatcttgtaaagaaggttctctactcagtcttgcctcttttgtcagtaacttactaaatgacccctgggcaggtattggcgcattttcccgtctgtttagaggacagaggtggtgactgagatggtgcctgcagtctcttccagttcacatttgagtctgggttcctcacctttcagcttacctttatggtagagccagtttaggccaaagacaaaatccccaataatgttctaataagtgctcactcgaaggttataaatcacagtgcacacaaactctgagttaaaacggtgcatggccacgtactggaaatctaaagagcatcattatcaggttggaaggcaagttaacttctctggttccttctttaaagtctgtaaaatacaaggtttccctgtggttcctttggtatcatgtgctgtttatacagaaagagtcccacaacttgcttttgagacctgcatcctaaaaccaaaatagctcgtgatacagcctctaagtcatcatttattgatttatagagcactcatcacatgaatgaggtgctttacaatacagtaaacatcacaacagaactcacatagttaaatacaatcaacaaattacagaactaaaaaaactgaaatgaagcaacattatgtcaaatttcaaagatgctgagaagtggcagtacaaaaaaggtaattccaccaactggagaccagacgggcaaagatacacaggcaccacagcccaaagcgggcagattcgtcgagggtgagtgggcatatcaaataaaatctcacaaccaagaatgaaggccgttaaagatactgacacccacgtgatcacagtactagtgga
